United States Patent Application Publication US 2026/0258423 A1 - sequence listing, part 14

SEQ ID NO: 167803 - DNA, 46709983 bp, Homo sapiens (residues 11,677,499-13,345,712 of 46,709,983)
  source 1..46709983: mol_type = genomic DNA
ttcccgtaaccactagacagaaacattctcagaaactcctttatgacgtatgcactcacctaacagagaagaaccttccttttgacagagcagttttgatacactctttttgtacaatctgcaagtggatatttggatagctgtgaagatttcgttggaaacgggaatatcttcctataaaatctacacagaagcattctcagaaactgctctgtgatgtctgcattcaagtcacagagttgaacattgcctttcatagagcaggtttgaaacgctctttttgtagtatatggaagtggacttatcggacggtttgaggcccatggtgataaagggaatatcttcccctgcaagctagaaagaagcattctgtgaaacttgtttgtgatgtgtgtactcaactaacagagttgaacctttcttttcacagagcagttttgaaacactctttttgtagaatctgcgaggggaaatttggatacatttcaggatttcgttggaaacgggaatatcttcatacaaaatctcgacagaagcattctcagaaacttctttgtgatatgtgcattcaagtcacagagttgaatattccctttcacagagtaggtttgaaacactctttttgtagcatctggaagtggacatttggagcgccttgactcctacggtgaaaagggaaatatcttcccataaaaactagacagaagcaatctcagaatcttctttgggatatatgcacgcagctaacagagttgaacctttctattgacagagcagttttgaaacagtctttctgtggaatctgcaagtggatatttggatagcttggagggtttcgttgtaaacgggattacgtataaaaagtagacagcagcatcctcagaaacttctttgtgatgtgtgcattcaagtcacagagttgaacattccctttcgtacagcagtttgaaacactttctgtagtatctggaagtgaacattaggacagctttcaggtctatggtgagaaaggaaatatcttcaaataaaaactagacagaagcattctcataaacttgtttctgatgtgtgaactaagctaacagaggtggatctttcttttgatagagcagttctgaaaaacactttttgttgaatctgcaagtggatatttggatagatttgaagatttcgttggaaacgggaatatcttcatatcaaatctagacagaagcattctcagaaaagtctttgtgatgtttgcattcaactcatagagttgaacattccctttcagagagcagctttgaagcactctttttgtagtatgtgcaagtggatatttggagcgctctgaggcctatggtgaaaaagcaaatatcttcccataaccactagacagaaacattctcagaaactcctttatgacatatgcactcacctaacagagaagaaccttccttttgacagagcagttttgatacactctttttgtagaatctgcaagtggatatttggatagctgtgaagatttcgttggaaacgggaatatcttcctataaaatctagacagaagcattctcagaaactgctctgtgatgtctgcattcaagtcacagagttgaacattgcctttcatagagcaggttgtaaatgctctttttgtagtatatggaagtggacatttcggacggtttgaggcccatggtgataaagggaatatcttcccctacaagctagaaagaagcattctgtgaaacttgtttgtgatgtgtgtactcaactaacagagttgaacctttcttttcacagagcagttttgaaacactctttttgtagaatctgcgaggggatatttggatagatttcaggatttcgttggaaacgggaaaatatcttcatataaaatctcgacagagaagcattctcagaaacttctttgtgatatctgcattcaagtcacagagttgaatattccctttcacagagtaggtttgaaacactctttttgtaatatctggaagtggacatttggagcgccttgacgtctacggtgaaaagggaaatatcttcccataaaaactagacagaagcaatctcagaatcttctttgggatatatgcaggcagctaacagagttgaacctttctattgacagagcagttttgaaacagtctttctgtggaatctgcaagtggatatttggatagattggaggatttcgctggaaacgggattacgtataaaaagtagacagcaacatcctcagaaacttctttgtgatgtgtgcattcaactcacagagttgaacattccctttcgtacagcagttttgaaacactctttctgtagtatctggaagtgaacattaggacagctttcagctctatggtgagaaaggaaatatcttcaaataaaaactagacagataagcattctcataaacttgtttgtgatgtgtgaactcagctaacagaggtggatctttcttttgatagagcagttcggaaaaacactttttgttgaatctccaagtggacatttggatagatttgaagatttcgttggaaacgggaatatctttatatcaaatctagacagaagcattctcggaaacgtctttgtcatgtttgcattcacctcatagagttgaacattccgtttaagagagcagctttgaagcactctttttgtagtatgtgcaaggggatatttggagcgctctgaggcctaaggtgaaaaagcaaatatcttcccataaccactagacagaaacattctcagaaactcctttatgacgtatgtactcacctaacagagaagaaccttccttttgacagagcagttttgatacactctttttgtagaatctgcaagtggatatttggatagctgtgaagatttcgttggaaacgggaatatcttcctataaaatgtagacagacaagcattctcagaaactgctctgtgatgtctgcattcaagtcacagagttgaacattgcctttcatagagcaggtttgaaactctctttttgtagtatatggaagtagacgtttcggacggtttgaggcccatggtgataaagggaatatcttcccctacaagctagaaagaagcattgtgtgaaacttgtttgtgatgtgtgtactcaactaacagagttgaacctttctttttacagagcagttttgaaacactctttttgtagaatctgcgaggggatatttggatacatttcagcatttcgttggaaacgggaatatattcatataaaatctcgacagaagcattctcagaaacttctttgtgatatgtgcattcaagtcacagagctgaatattccctttcacagagtaggtttgaaacactctttttgtagtatctggaagtggacatttggagcgccttgacacctacggtgaaaagggaaatatcttcccataaaaactagacagaagcaatctcagaatcttctttgggatatatgcacgcagctaacagagttgaacctttctattgacagagcagttttgaaacagtctttctgtggattctgcaagtggatatttggataggttggaggatttcgttggaaacgggattacgtataaaaagtagacagcagcatcctcagaaacttctttgtgatgtgtgcattcaagtcacagagttcaacattccctttcgtacagcagttttgaaacactctttctgtagtatctggaagtgaacattaggacagctttcaggtctatggtgagaaaggaaatattcttcaaataaaaactagacagaagcattctcataaacttgtttgtgatgtgtgaactcagctaacagaggtggatctttcttttgatagagcagttctgaaaaacactttctgttgaatctgcaagtggacatttggatagatttgaagatttcgttggaaacgggaagatcttcatatcaaatctagacagaaagcattctcagaaacgtctttgtgatgtttgcattcaactcatagagttgaacattccctttcagagagcagctttgaagcactctttttgtagtatgtgcaagtggatatttggagcgctctgaggcctacggtgaaaaagcaaatatcttcccataaccactagacagaaacattctcagaaactcctttatgacgtatgcactcacctaacagaaaagaaccttccttttgacagagcagttttgatacactctttttgtagaatctgcaagtggatatttggatagctgtgaagatttcgttggaaacgggaatatcttcctataaaatttagacagaagcattctcagaaactgctctgtgatgtctgcattcaagtcacagagttgaacattgcctttcatagagcacgtttgaaacgctctttttgtagtatatggaagtagacttttcggacggtttgaggcccatagtgataaagggaatatcttcccctacaagatagaaagaagcactctgtgaaacttgtttgtgatgtgtgtattcaactaacagagttgaacctttctttttacagagcagttttgaaacactctttttgtagaatctgcaaggggatatttggatagatttcaggatttcgttggaaacgggaatatcttcatataaaatctcgacagaagcattctcagaaacttctttgtaatatgtgcattcaagtcacagagttgaatattccctttcacagagtaggtttgaaacactctttttgtagtatctggaagtggacatttggagcgccttgacacctatggtgaaaagggaaatatcttcccataaaaagtagacagaaggaatctcagaatcttctttgggatatatgcacgcagctaacagagttgaacctttctattgacagagcagttttgaaacagtctttctgtggaatctgcaagtggatatttggatagcttggaggatttcgttggaaacgggattacgtatcaaaagtagacagcagcatcctcagaaacttctttgtgatgtgtgcattcaagtcacagacttgaacattccctttcgtacagcagttttgaaacactctttctgtagtatctggaagtgaacattaggacagctttcagctctatggtgagaaaggaaatatcttcaaataaaaactagacagaagcattctcataaacttgtttgtgatgtgtgaactcagctaacagaagtggatctttcttttgatagagcagttctgaaaaacactttttgttgaatctgcaagtggacatttggatagatttgaagatttccttggaaacgggaatatcttcatatcaaatctagacagaagcattctcagaaacgtctttgtgatgtttgcattcaactcatagagttgaacattccctttaagagagcagctttgaagcactctttttgtagcatgtgcaagtggacatttggagcgccctgaggcctacggggaaaaagaaaatatcttcccataaccactagacagaaacattctcagaaactgctttatgacgtatgcactcacctaacagagaagaaccttccttttgacagagcagttttgatacactctttttgtagaatctgcaagtggatatttggatagctgtgaagatttcgttggaaacgggaatatcttcttataaaatctagacagaagcattctcagaaacagctctgtgatgtctacattcaagtcacagagttgaacattgcctttcatagagcaggtttgaaacgctctttttgtagtatatggaagtggacgtttcggacggtttgagacccatggtgataaagggaatatcttcccctacaagctagaaagaagcattctgtgaaacttgtttgtgatgtgtgtactcaactaacagagttgaacctttctttttacagagcagttttgaaacactctttttgtagaatctgcgaggggatatttggatagatttcagcatttcgttggaaacgggaatatcttcatataaaatctcgacagaagcattctcagaaacttctttgtcatatctgccttcaagtgacagagttgaatattccctttcacagagtaggtttgaaacactctttttgtagtatctggaagtggacatttggagtgccttgacgcctacggtgaaaagggaaatatcttcccataaaaactagacagaagcaatctcagaatcttctttgggatatatgtacgcagctaatagagttgaacctttctattgacagagcagttttgaaacagtctttctgtggaatctgcaaggggatatttggatagcttggaggatttcgttggaaacgggattacgtataaaaagtagacagcagcatcctcagaaacatccttgtgatgtgtgcattcaagtcacagagttgaacattccctttcgtacagcagttttgaaacactctttctgtagtatctggaagtgaacattaggacagctttcaggtctatggtgagaaaggaaatatcttcaaataaaaactagacagaagcattctcataaacttgtttgtgatgtgtgaactcagctaacagaggtagatctttcttttgatagagcagttctgaaaaacactttttgttgaatctgcaagtggacatttggatagatttgaagatttcgttggaaacgggaatatcttcatatcaaatctagacagaagcattctcagaaacgtctttgcgatgtttgcattcaactcatagagttgaacattccctttgagagagcagctttgaagcactctttttgtagcatgtgcaagtggacatttggagcgccctgaggccgacggggaaaaagcaaatatcttcccataaccactagacagaaacattctcagaaaatcctttatgaccgtatgcactcacctaacagagaagaaccttccttttgacagagcagttttgatacactctttttgtagaatctgcaagtggatatttggatagctgtgaagatttcgtttgaaacgggaatatcttcctataagatctagacagaagcattctcagaaactgctctgtgatgtctgcattcaagtcacagagttgaacattacctttcctagagcaggtttgaaacgctctttttgtagtatatggaagtggacgtttcggacggtttgaggaccatggtgataaagggaatatcttcccctacaagctagaaagaagcattctgtgaaacttgtttgtgatgtgtgtactcaactaacagagttgaacctttctttttacagagcagttttgaaaccctctttttgtagaatctgcgaggggatatttggatacatttcagcatttcgttggaaacgggaatatcttcatataaaatctcgacagaagcattctcagaaacttcttgtgatatctgcattcaagtcacagagttgaatattccctttcacagagtaggtttgaaacactctttttgtagtatctggaagtggacatttggagcgccttgacccctacgatgaaaagggaaatatcttcccataaaaactagacagaagcaatctcagaatcttctttgggatacatgcacgcagctaacagagttgaacctttctattgacagagtagttttgaaacagtctttctgtggaatctgcaagtggatatttggatagcttggaggatttcgttggaaacgggattatgtataaaaagtagacagcagcatcctcagaaacttctttgtgatgtgtgcattcaagtcacagagttgaacattccctttcgtacaacagttttgaaacactctttctgtagcatctggaagtgaacattaggacagctttcaggtctatggtgagaaaggaaatatcttcaaataaaaactagacagaagcattctcataaacttgtttgtgatgtgtgaactcagctaacagaggtggatctttcttttgatacagcagttttgaaaaacactttttgttgaatccgcaagtggacatttggatagatttgaagatttcattggaaacgggaatatcttcatatcaaatctagacagaagcattctcagaaacgtctttgtcctgtttgcattcaactcatagagttgaacattccctttcagaaagcagctttgaaacactctttttgtagtatgtgcaagtggatatttggagcgctctgaggcctacggtgaaaaagaaaatatcttcccataaccactagacagaaacattctcagaaactcctttatgacgtatgcactcacctaacagagaagaaccttccttttgacagagcagttttgatacactctttttgtagaatctgcaagtggatatttggatagctgtgaagattccgttggaaacgggaatatcttcctataaaatctagacagaagcattctcagaaactgctctgtgatgtctgtattcaagtcacagagttgaacattgcctttcatagagcaggtttgaaacgcttttttgtagtatatggaagtggatgtttcggacggttggaggcccatggtgataaagggaatatcttcccctacaagctagaaagaagcattctgtgaaacttgtttgtgatgcgtgtactcaactaacagagttgaacctttctttttacagagcagttttgaaacactctttttgtagaatctgcgaggggatatttggatagatttcaggatttcgttggaaacgggaatatcttcatataaaatctcgacagaagcattctcagaaacttctttgtgatatctgcattcaagtcacagagttgaatattccctttcacagagtaggtttgaaacactctttttgtagtatctggaagttgacatttggtgcgccttgacgcctacggtgaaaagggaaatatcttctcataaaaagtagacagaagcaatctcagaatcttctttgggatatatgcacgcagctaacagagttgaacctttctattgacagagcacttttgaaacagtctttctgtggaatctgcaagtggatatttggatagcttggaggatttcgttggaaacgggattacgtataaaaagtagacagcagcatcctcagaaacttctttgtgatgtgtgcattcaagtcacagagttgaacattccctttcgtatagcagttttgaaacactctttctgtagtatctggaagtgaacattaggacagctttcaggtctatggtgagaaaggaaatatcttcaaataaaaactagacagaagcattctcataaacttgtttgtgatgtgtgaactcagctaacgaacgtggatctttcttttgatagagcagttctgaaaaacactttttgttgaatctgcaagtggacatttggatagatttgaagatttcgttggaaacgggaatatcttcatatcaaatctagacagaagctttctcagaaacgtctttgtgatgtttgcattcaactcatagagttgaacattccgtttcagagagcagctttgaggcactctttttgtagtatgtgcaagtggatatttggagcactctgaggcctacggtgaaaaagcaaatatcttcccataaccactagacagaaacattctcagaaactcctttatgacgtatgcactcacctaacagagaagaaccttccttttgacagagcagttttgatacactctttttgtagaatctgcaagtggatatttggatagctgtgaagatttcgttggaaacgggaatatcttgcctataaaatctagacagaagcattctcagaaactgctatctgatgtctgcattcaagtcacagagttgaacattgcctttcctagagcaggtttgaaacgctctttttgtagtatatggaagtggacgtttcggacggtttgaggcccatggtgataaagggaatatcttcccctacaagctagaaagaagcattctgtgaaacttgtttgtgatgtgtgtactcaactaacagagttgaacctttcttttcacagagcagttttgaaacactctttttgtagaatctgcgaggggatatttggatagatttcaggatttcgttggaaacgtgaatatcttcatataaaatctcgacagaagcattctcagaaacttctttgtgatatgtgcattcaagtcacagagttgaatattccctttcacagagtaggtttgaaacactctttttgtagtatctggaagtggacatttggagcgccttgacacctacggtgaaaagggaaatatcttcccatcaaaactagacagaagcaatctcagaatcttctttgggatatatgcacgcagctaccagagttgaacctttctattgacagagcagttttgaaacagtctttctgtggaatctgcaagtggatatttggatagcttggaggatttcgttggaaacgggattacgtataaaaagtagacagcagcatcctcagaaacttctttgtgatgtgtgcatccaagtcacagagttgaacattccctttcgtacagcagttttgaaacactctttctgtagtatctggaagtgaacattaggacagctttcagctctatggtgagaaaggaaatatcttcaaataaaaactagacagaagcattctgataaacttgtttgtgaagtgtgatctcagctaacagaggtggatctttcttttgatagagcagttctgaaaaacactttgtatgaatctgcaagtggacatttggatagatttcaagatttcgttggaaacgggaatatcttcatatcaaatctagacagaagcattctcagaaacgtctttgtgatgtttgcattcaactcatagagttgaacattccctttcagagagcagctttgaagcactctttttgtagtatgtgcaagtgcatatttggagcgctctgaggcctacggtgaaaaagcaaatatcttcccataaccactagacagaaacattctcagaaactcctttatgatgtatgcactcacctaacagagaagaaccttccttttgacagagcagttttgatacactctttttgtagaatctgcaagtggatatttggatagctgtgaagatttcgttggaaacgggaatatcttcatataaaatctagacagaagcattctcagaaactgctctgtgaagtctgcattcaagtcacagagttgaacattgcctttcatagagcaggtttgaaacgctctttttgtagtatatggaagtggacgtttcggacggtttgaggcccatggtgataaagggaatatcttcccctacaagctagaaagaagcattctgtgaaacttgtttgtgatgtgtgtcctcaactaacagagttgaacctttctttttacagagcagttttgaaacactctttttgtagaatctgcgaggagatatttggatagatttcaggattttgttggaaacgggaatatcttcatataaaatcgcgacagaggcattctcagaaacttcattgtgatatctgcattcaagtcacagagttgaatattccctttcacagagtaggtttgaaacactctttttgtagtatctgtaagtggacatttggagtgccttgacacctacggtgaaaagggaaatatcttcccctaaaaactagacagaagcaatctcagaatcttctttgggatatatgcatgcagctaacagagttgaacctttctattgacagagcagttttgaaacagtctttctgtggaatctgcaagtggatatttggatagcttggaggatttcattggaaacgggattacgtataaaaagtagacagcagcatcctcagaaacttctttgtgatgtgtgcattcaagtcacagagttgaacattccctttcgtacagcagttttgaaacactctttctgtagtatctggaagtgaacattaggacagctttcaggtctatggtgaggaaggaaatatcttcaaataaaaactagacagaagcattctcataaacttgttttgatgtgtgaactcagctaacagaggtggatctttcttttgatacaacacttttgaaaaacactttttgttgaatctgcaagtggacatttggatagatttgaagatttctttggaaacgggaatatcttcatatcaaatctagacagaagcattctcagaaacgtctttgtgatgcttgcattcaactcatagagttgaacattccctttcagagagcagctttgaagcactctttttgtagtatgtgcaagtggagatttggagcgctttgaggcctacggggaaaaagcaaatatcttcccataaccactagacagaaacattctcagaaactcctttatgacgtatgcactcacctaacagaaaagaaccttccttttgacagagcagttttgatacacgctttttgtagaatctgcaagtggatatttgtatagctgtgaagatttcgttggaaacgggaatatcttcctataaaatctagacagaagcattctcagaaactgctctgtgatgtctgcattcaagtcacacagttgaacattgcctttcatagagcaggtttgaaacgctctttttgtagtatatggaagtagacgtttcggacggtttgaggcccatggtgataaagggaatatcttcccctacaagctagaaagaagcattctgtgaatcttgtttgtgatgtgtgtactcaactaacagagttgaacctttctttttatagagcagttttgaaacactctttttgtagaatcttcgaggggatatttggatagatttcaggatttcgttggaaacgggaatatcttcatataaaatctcgacagaagcattctcagaaacttctttgtgatatctgcattcaagtcacagagttgaatattccctttcacagagtaggtttgaaacactctttttgaagtatctggaagtgtacatttggaacgccttgacgcctacggtgaaaaggaaaatatcttcccataaaaactagacagaagcaatctcagaatcttctttgggatatatgcacgcagctaacagagttgaacctttctattgacagagctgttttgaaacagtctttctgtggaatctgcaagtggatatttggatagcttggaggatttcgttggaaacgggattacgtataaaaagtagacagcagcatcctcagaaacttctttgtgatgtgtgcattcaagtcacagagttgaacattccctttcgtacagcagttttgaaacactctttctgtagtatctggaagtgaacattaggacagctttcaggtctattttgagaaaggaaatatcttcaaataaaaactagacagaagcattctcataaacttgtttgtgatgtgtgaacccagctaacagaggtggatctttcttttgatagagcagttctgaaaaacactttttgttgaatctgcaagtggacatttggatagatttgatgatttcgttggaaacgggaatatcttcatatcaaatctagacagaaggattctcagaaacgtctttgtgatgtttgcattcaactcatagagttgaacattccgtttcagagagcagctttgaagcactctttttgtagtatgtgcaagtggatatttggagcgctctgaggcctaaggtgaaaaagcaaatatcttcccataaccactagacagaaacattctcagaaactcctttatgacgtatgtactcatctaacagagaagaaccttccttttgacagagcagttttgatacactctttttgtagaatctgcaagtggatatttggatagctgtgaagatttcgttggaaacgggaatatcttcctataaaatctagacagaagcattctcagaaactgctctgtgatgtctgcattcaagtcacagagttgaacattgcctttcctagagcagtttagaaacgctctttttgtagtatatggaagtggacgtttcggacggtttgaggcccatggtgataaagggaatatcttcccctacaagctagaaagaagcattctgtgaaacttgtttgtgatgtgtgtactcaactaatagagttgaaactttctttttacagagcagttttgaaacactctttttgtagaatctgcgaggggatatttggatagatttctggatttcgttggaaaggggaatatcatcatataaaatctcgacagaagcattctcagaaacttctttgtgatatgtgcattcaagtcacagagttgaatattccctttcacagagtaggtttgaaacactctttttgtagtatctggaagtggacatttggagcgccttgacgcctacggtgaaaagggaaagatcttcccataaaaactagacagaagcaatctcagaatcttctttgggatatatgcacgcagctaacagagttgaacctttctattgacagagcagttttgaaacagtctttctgtggaatctggaagtggatatatggatagcttggaggatttcgttggaaacgggattacgtataaaaagtagacagcagcatcctcagaaacttctttgtgatgtgtgcattcaagtcacagagttgaacattccctttcgtacagcagttttgaaacactctttctgtagtatctggaagtgaacattaggacagctttcaggtctatggtgagaaaggaaatatctttaaataaaaactagacagaagcattctcataaacttgtttgtgatgtgtgaactcagctaacagaggtggatctttcttttgatacagcagttttgaaaaacactttttgttgaatttgcaagtggacatttggatagatatgaagatttcgttggaaacgggaatatcttcatatcaaatctagacagaagcattctcagaaacgtctttgtcatgtttgcattcaactcatagagttgaacattccctttcagagagctgctttgaaacactctttttgaagtatgtgcaagtggatatttggagcgctctgaggcctacggtgaaaaagcaaatatcttcccataaccactagacagaaacattctcaggaactcctttatgacgtatgcactcacctaacagagaagaaccttccttttgacagagcagttttgatacactctttttgtagaatctgcaagtggatatttggatagctgtgaagatttcgttggaaacgggaatatcttcctataaaatctagacagaagcattctcagaaactgctctgtgatgtctgcattcaagtcacagagttgaacattgcctttcatagagcaggtttgaaacgctctttttgtagtatatggaagtggacgtttcggacggtttgaggcccatggtgataaagggaatatcttcccctacaaggtagaaagaagcattctgtgaaacttgtttgtgatgtgtgtactcaactaacagagttgaacctttctttttacagagcagtttggaaacactctttttgtagaatctgcgaggggatatttggatagatttcaggatttcgttggaaacgggaatatcttcataaaaaatctcgacagaagcactctcagaagcttctttgtgatatgtgcattcaagtcacagagttgaatattccctttcacagagtaggtttgaaacactctttttctagtatctggaagtggacatttggagcgccttgacacctacggtgaaaagggaaatatcttcccctaaaaactagacagaagcaatctcagaattttctttgggatatatgcacacagctaacagagttgaacttttctattgacagagcagttttgaaacagtctttctgtggaatctgcaagtggatatttggatagcttggaggatttcgttggaaacgggattatgtataaaaagtagacagcagcatcctcagaaacttctttgtgatgtatgcattcaagtcccagagttgaacattccctttcgtacagcagttttgaaacactctttctgtagtatctggaagtgaacattaggacagatttcaggtctatggtgagaaaggaaatatcttcaaataaaaactagacagaagcattctcataaacttgtttgtgatgtgtgaactcagctaaaagaggtggatctttcttttgatagagcagttctgaaaaacactttttgttgaatctgcaagtggacatttggatggatttgaagatttctttggaaacgggaatatcttcatatcaaatctagacagaagcattctcagaaacgtctttgtgatgtttgcattcaactcatagagttgaacattccctttcagagagcagctttgaagcactctttttgtagtatgtgcaaggggatatttggagctctctgaggcctaaggtgaaaaagcaaatatcttcccataaccactagacagaaacattctcagaaactcctttatgacgtatgcactcacctaacagagaagaaccttccttttgacagagcagttttgatacactctttttggagaatctgcaagtggatatttggatagctgtgaagatttcgttggaaacgggaatatcttcctataaaatctagacagaagcattctcagaaactgctctgtgatgtctgcattcaagtcacagagttgaacattgcctttcatagagcaggtttgaaatgctctttttgtagtatatggaagtggatgtttcggacggtttgaggcccatcgtgataaagggaatatcttcccctacaagctagaaagaagcattctgtgaaacttgtttgtgatgtgtgtactcaactaacagagttgaacctttctttttacagagcagttttgaaacactctttttgtagaatctgcgaggggatatttggatacatttcagcatttcgttggaaacgagaatatcttcatataaaatctcgacagaagcattctcagaaacttctttgtgatatgtgcattcaagtcacatagttgaatattccctttcacagagtaggtttgaaacactctttttgtagtatctggaagtggacatttggagcgccttgacacctacggtgaaaagggaagtatcttcccatcaaaactagacagaagcaatctcagaattttctttgggatatatgcacacagctaacagagttgaacttttctattgacatagcagttttgaaacagtctttctgtggaatctgcaagtggatatttggatagcttggaggatttcgttggaaacgggattacgtataaaaattagacagcagcatcctcagaaacttctttgtgatgtgtgcattcaagtcacagagttgaacattccctttcgtacagcagttttgaaacactctttctgtagtaactggaagtgaacattaggacagctttcaggtctatggagagaaaggaaatatcttcaaataaaaactagacggaagcattctcataaacttgtttgtgatgtgtgaactctgctaacagaggtggatctttcttttgatagagcagttctgaaaaacactttttgttgaatctgcaagtggacatttggatagatttgaagatttcgttggaaacgggaatatcttcatatcaaatctagacagaagcattctcagaaacgtctttgtgatatttgcattcaactcatagagttgaacattccctttcagagagcagctttgaagcactctttttgtagtatgtgcaagtggatatttggatcgctctgaggcctaaggtgaaaaagcaaatatcttcccataaccactagacagaaacattctcagaaacttctttatgacgtatgtactcaactagcagagaagaactttccttttgacagagcatttttgatacactctttttgtagtatctgcaagtgaatatttggatagctgtgaagatttcgttggaaacaggaatatcttcatatgaaatctagacagaagcattctcagaaactgctctgtgatgtctgcattcaagtcacagagttgaacactgcctttcctagagcaggtttgaaacgctctttttgtagtatatggaagtggacgtttcggacggtttgaggcccatggtgataaagggaatatcttcacctacaagctagaaagaagcattctgtgaaacttgtttgtgatgtgtgtactcaactaacagacttgaacctttctttttacagagcagttttgaaacactctttttgtagaatctgcgaggggatatttggatagatttcaggatttcgttggaaacgggaatatcttcatataaaatctcgacagaagcattctcagaaacttctttgtgatatgtgcattcaagtcacagagttgaatattccctttcacagagtaggtttgaaacactctttttgtagtatctggaagtggacattcggagcgccttgacgcctacggtgaaaagggaaatatcttcccataaaaactagacagaagcaatctcagaatcttctttgggatatatgcacgcagctaacagagttgaacctttctattgacagagcagttttgaaacattctttctgtggaatctgcaagtggatatttggatagcttggaggatttcgttggaaacgggattacgtataaaaagtagacagcagcatcctcagaaacttctttgtgatatgtgcattcaagtcacagagttgaacattccctttcatacagcagttttgaaacactctttctgtagtatctggaagtgaactttaagagagctttcaggtatattgtgagaaaggatatatcttcaaataaaagctagacagaagcattctcataaacttatttgtgatgtgtgaactcagctaacagaggtggatctttcttttgatagagcagttctgaaaaacactttttgttgaatctgcaagtggacatttggatagatttgaagatttcgttggaaacgggaatatcttcatatcaaatctagacagaagcattctcagaaacgtctttgtgatgtttgcattcaactcatagagttgaacattccctttcagagagcagctttgaagcactctttttgtagcatgtgcaagtggatatttggagccctctgaggcctacggtgaaaaagcaaatatcttcccataaccactagacagaaacattctcagaaactcctttatgacgtatgcactcacctaacagagaagaaccttccttttgacagagcagttttgatacactctttttgtagaatctgcaagtggatatttggatagctgtgaagatttcgttggaaaccggaatatcttcctataaaatctagacagaaggattctcagaaactgctctgtgatgtctgcattcaagtcacagagttgaaaattgcctttcatagagcatgtttgaaaggctctttttgtagtatatggaagtggacgtttcggacggtttgaggcccatggtgataaagggaatatcttcccctacaagctagaaagaagcattctgtgaaacttgtttgtgatgtgtgtactcaactaacagagttgaacctttcttttcacagagcagttttgaaacactctttttgtagaatctacgaggggatatttggatagatttcagcatttcgttggaaacgggaatatcttcatataaaatctcgacagaagcattctcagaaacttctttgtgatatgtgcattcaagtcacagagttgaatattccctttcacagagtaggtttgaaacactctttttgtagtatctgtaagtggacatttggagcgccttgacacctacggtgaaaagggaaatatcttcccataaaaactagacagaagcaatctcagaatcttctttgggatatatgcacgcagctaacagagttgaacctttctattgacagagcagttttgaaacagtctttctgtggaatctgcaagtgcatatttggatagcttggaggatttcgttggaaacgggattacgtataaaaagtagacagcagcctcctcagaaacttctttgtgatgtgtgcattcaagtcacagagttgaacattccctttcgtacagcagttttgaaacactctttctgtagtatctggaagtgaacattaggacagctttcaggtctatggtgagaaaggcaatatcttcaaataaaaactagacagaagcattctcataaaatagtttgtgatatgtgaactcagctaacagacgtggatctttcttttgatacagcagttttgaaaaacactttttgttgaatctgcaagtggacatttggatagatttgaagatttcattggaaacgggaatatcttcatatcaaatctagatagaaagcattctcagaaacgtctttgtgatgtttgcattcaactcatagagttgaacattccctttcagagagcagctttgaagcactctttttgtagtatgtgcaagtggatatttggagcgctctgaggcctacggtgaaaaagcaaatatcttcccataaccactaggcagaactttctcagaaactcctttatgacgtatgtactcacctaacagagaagaaccttccttttgacagagcagttttgatacactctttttgtagaatctgcaagtggatatttggatacctgtgaagatttcgttggaaacgggaatatcttcctataaaatctagacagaagcattctcagaaactgctctgtgatgtctgcattcaagtcacagagttgaacattgcctttcatagagcaggtttgaaacactctttttgtagtatatggaagtggacgtttcggacggtttgaggcccatggtgatgaagggaatatcttcccctacaagctagaaagaagcattctgtgaaacttgtttgtgatgtgtgtactcaactaacagagttgaacctttctttttacagagcagttttgaaacactctttttgtagaatctgcgaggggatatttggatagatttcaggatttcgtaggaaacgggaatatcttcatagaaaatctcgacagaagcattctcagaaagtactttgtgatatctgcattcaagtcacagagttgaatattccctttcacagagtaggtttgaaacactctttttgtagtatctggaagtggtcatttggagcgccttgacgtctacggtgaaaagggaaatatcttcccataaaaactagacagcagcaatctgagaatcttctttgggatacatgcacgcagctaacagagttgaacctttctattgacagagcagttttgaaaaagtctttctgtggaatctgcaagtggatatttggatagattggaggatttcgttggaaacgggattacgtataaaaagtagacagcagcatcctcagaaacttctttgtgatgtgtgcattcaagtcacagggttgaacattccctttcgtacagcagttttgaaacactctttctgtagtatctggaagtgaacattaggacagctttcaggtctatggtgagaaaggaaatatcttcaaataaaaactagacagaagcattctcataaacttgtttgtgatgtgtgaactcagctaacagaggtggatctttcttttgatagagcagttctgaaaaacactttttgttgaatctgcaagtggacatttggatagatttgaagatttcgtaggaaacgggaatatcttcatatcaaatctagacagaagcattctcagaaacgtctttgcgatgtttgcattcaactcatagagttgaacattccgtttcagagagcagctttgaggcactctttttgtagtatgtgcaagtggatatttggagcgctctgaggccttcggtgaaaaagcaaatatcttcccataaccactagacggaaacattctcagaaactcctttatgacgtatgcactcacctaacagagaagaaccttccttttgacagagcagttttgatacactctttttgtagaatctgcaagtggatctttggatagctgtgaagatttcgttggaaacgggaatatcttcctataaaatctagacagaagcattctcagaaactgctctgttctgtctgcattcaagtcacagagttgaacattgcctttcatagagcaggtttgaaacgctctttttgtagtatatggaagtggacgtttcggacggtttgaggcccatggtgataaagggaatatcttcccctacaagctagaaagaagcattctgtgaaacttgtttgtgatgtgtgtactcaactaacagagttgaacctttctttttacagagcagttttgaaacactctttttgtagaatctgcaaggggatatttgaatagatttcaggatttcgttggaaaggggaatatcttcatataaaatctcgacagaagcgttctcagaaacttctttgtgatatgtgcattcaagtcaaagagttgaatattcgttttaacagagtcggtttgaaacactctttttgtagtatctggaagtggacatttggagcgccttgacgcctacggtgaaaagggaaatatcttccaataaaaactagacagaagcaatctcagaatcttctttgggatatatgcacgcagctaacagagttgaacctttctattgacagagcagttttgaaacagtctttctgtggaatctgcaagtggacatttggatagcttggagaatttcgttggaaacgggattacgtataaaaagtagacagcagcatcctcagaaacttctttgtgatgtgtgcattcaagtcacagagttgaacattccctttcgtacagcagttttgaaacactctttctgtagtatctggaagtgaacattaagacagcattcaggtctatggtgagaaaggaaatatcttcaaataaaaactagacagaagcattctcaagaacttgtttgtgatgtgtgaactcagctaacagaggtggatgtttcttttgatagagcagttctgaaaaacacgttttgttgaatctgcaagtggacatttggatagatatgaagatttcgttggaaacgggaatatcttcatatcaaatctagacagaagcattctcggaaacgtctttgtcacgtttgcattcaactcatagagttgaacattccgtttcagagagcagctttgaagcactctttttgtagtatgtgcaaggggatattttgagcgctgtgaggcctacggtgaaaaagcaaatatcttcccataaccactagacagaaacattctcagaaactcctttatgacgtatgcactcacctaacagaaaagaaccttccttctgacagagcagttttgatacactctttttgtagaatctgcaagtggatatttggatagctgtgaagatttcgttggaaacgggaatatcttcctataaaatctagacagaagcattctctgaaactgctctgggatgtctgcattcaagtcacggagttgaacattgcctttcctagagcaggtttgaaacgctctttttgtagtatatggaagtggacgtttcggactgtttgaggcccatggtgataaagggaatatcttcccctacaagctagaaagaagcattgtgtgaaacttgtttgtgatgtgtgtactcaactaacagagttgaacctttctttttacagagcagttttgaaacactctttttgtagaatctgcaaggggatatttggatagatttcaggatttcattggaaacgggaatatcttcatataaaatctcgacagaagcattctcagaaacttctttgtgatatctgcattcaagtcacagagttgaatattccctttcacagagtaggtttcaaacactctttttatagtatctggaagtggacatttggagcgccgtgacgcctacggtgaaaagggaaatatcttcccataaaaactagacagaagcaatctcagaatcttctttgggatatatgcacgcagctaacagagttgtacctttctattgacagagcacttttgaaacagtctttctgtggaatctgcaagtggatatttggatagcttggaggatttcattggaaacgggattacatataaaaagtagacagcagcatcctcagaaacttctttgtgatgtgtgcattcaagtcacagagttgaacattccctttcatacagcagttttgaaacactctttctgtagtaactggaagtgaacattaggacagctttcaggtctatggtgagaaaggaaatatcttcaaataaaaactagacagaagcattctcataaacttgttcgtgatgtgtgaactcagctaacacacgtggatctttcttttgatagagcagttctgaaaaacagtttttgttgaatctgcaagaggacatttggatagatttgaagatttcgttggaaacgggaatatcttcatatcaaatctagacagaagcattcccagaaacgtctttgtgatgtttgcattcaactcatagagttgaacattccgtttcagagagcatctttgaagcactctttttgtagtatgtgcaagtggatatttggagcgctctgaggcctacggggaaaaagcaaatatcttcccataaccactagactgaaacattcccagaaactcctttatgacgtatgcactcacctaacagaaaagaaccttccttttgacagagcagttttgatacactctttttgtagaatctgcaagtggatatttggatagctgtgaagatttcgttggaaacgggaatatcttcctataaaatctagacagaagcattctcagaaactgctctgtgatgtctgcattcaagtcacagagttgaacgttgcctttcatagagcaggtttgaaacgctctttttgtagtatatggaagtggacttatcggacggtttgaggcccatggtgataaagggaatatcttcccctacaagctagaaagaagcattgtgtgaaacttatttgtgatgtgtgtactcaactaacagagttgaacctttctttttacagagcagttttgaaacactctttttgtagaatctgcgaggggatatttggatagatttcagcatttcgttggaaacgggaatatcttcatataaaatctcgacagaagcattctcagaaacttctttatgatatctgcattcaagtcacagagttgaatattccctttcacagagtaggtttgaaacactctttttgtagtatctggaagtggacatttggagcgccttgacccctacggagaaaagggaaatatcttcccataaaaactagacagaagcaatctcagaatcttctttgggatatatgcacgcagctaacagagttgaacctttctattgacagagcagttttgaaacagcctttctgtggaatctgcaagtggatatttggatagcttggaggatttcgttggaaacgggattacgtataaaaagtagacagcagcatcctcagaaactcctttgtgatgtgtgcattcaagtcacatagttgaacattccctttcgtacagcagttttgaaacactctttctgtagtatctggaagtgaacattaggacagctttcagctctatggtgagaaaggaaatatcttcaaataaaaactagacagaagcattctcataaacttgtttgtgatgtgtgaactcggctaacacaggtggatctttcttttgattgagcagttctgaaaaacacgttttgttgaatctgcaagtggacatttggatagatttgaagatttcgttggaaacgggaatatcttcatatcaaatctagagagaagcattctcagaaacgtctttgtgatgtttgcattcaactcatagagttgaacattccctttcagagagcagctctgaagcactctttttgtagtatgtgcaaggggatatttggagcgctctgaggcctacggtgaaaaagcaaatatcttcccataacgactagacagaaacattctcagaaactcctttacgacgtatgcactcacctaacagagaagaaccttccttttgacagagcagttttgatacactctttttgtagaatctgcaagtggatatttggatagctctgaagatttcgttggaaacgggaatatcttcctataaaatctagacagaagcattctcagaaactgctctgtgatgtctgcattcaagtcacagagttgaacattacctttcatagagcaggtttgaaacgctctttttgtagtatatggaagtggacgtttcggacggtttgaggcccatggtgataaagggaatatcttcccctacaagctagaaagaagcattctgtgaaacttgtttgtgatgtgtgtactcaactaacagagttgaacctttctttttacagagcagttttgaaacactctttttgtagaatctgcgaggtgatatttggatagatttcaggatttcgttgtaaacgggaatatcttcatataaaatctcgacagaagcattctcagaaacttctttgtgatatgtgcattcaagtcacagagttgaatattccctttcacagagtaggtttgaaacactctttttgtagtatctggaagtggacatttggagcgccttgacacctacggtgaaaagggaaatatcttcccacaaaaactagacagaagcatcctcagaaacatccttgtgatgtgtgcattcaagtcacagagttgaacattacctttcgtacagcagttttgaaacactctttctgtagtatctggaagtgaactttaggacagctttcaggtctatagtgagaaaggatatatcttcaaataaaaactagacagaagcattctcataaacttctttgtgatgtgtgaactcacctaacagaggtggatctttcttttgatagagcagttctgaaaaacactttttgttgaatctgcaagtggacatttggatagatatgaagatttcgttggaaacgggaatatcttcatatcaaatctagacagaagcattctcagaaacgtctttgtgatgtttgcattcaactcatagagttgaacattccctttcagagagcagctttgaagcactctttttgtagtatgtgcaagtggacatttggagcgctctgaggcctaaggtgaaaaagcaaatatcttcccataaccactagacagaaacattctcagaaacttctttatgacgtatgtactcaactagcagagaagaactttccttttgacagagcttttttgatacactcttttgtagtatctgcaagtggatatttggatagctgtaaagatttcgttggaatcgggaatatcttcctataaagtcaggacagaagcattctcagaaactgctctgtgatgtctgcattcaagtcacagagttgaacattgcctttcatagagcaggtttcaaacactcttttgttagtatatggaagtggacgtttcggacggtttgaggcccatggtgataaaggaaatttcttcccctacaagctagaaagaagcattctgtgaaacttgtttgtgatgtgtgtactccactaacagagttgaacctttctttttacagagcagttttgaaacactctttttgtagaatctgcgaggggatatttggatagatttcaggatttcgttggaaacgggaatatcttcatataaaatctcgacagaagcattctcagaaacttctttgtgatatctacattcaagtcacagggttgaatattccctttcacagagtaggtttgaaacactctttttgtagtatctggaattggacatttggagcaccttgacacctacggtgaaaagggaaatatcttcccataaaaactagacagaagcaatctcagaatcttctttgggatatatgcacgcagctaacagagttgaacctttctattgacagcagttttgaaacagtctttctgtggaatctgcaagtggatatttggatagcttggaggatttcgttggaaacaggattacgtataaaaagtagacagcagcatcctcagaaacttctttgggatgtgtgcattcaagtcacagagttgaacattccctttcgtacagcagttttgaaacactctttatgtagtatctggaagtgaacattaggacagctttcaggtctatggtgagaaaggaaatatcttcaaataaaaactagacagaagcattctcataaacttgtttgtgatgtgtgaactcagctaacagaggtggatctttcttttgatagagcagttctgaaaaacactttttgttgaatctgcaagtggccatttggatagatttgaagatttcgttggaaacgggaatatcttcatatcaaatctagacagaagcattctcagaaacgactttgtgatgttagcattcaactcatagagttgaacattccctttcagagagcagctttgaagcactctttttgtagtatgtgcaagtggacatttggagcgctttgaggcctacagggaaaaagcaaatatcttcccataaccactagacaggaacattctcagattactcctttatgacgtatgtactcaactaacagagaagaaccttccttttgacagagcagttttgatacactctttttgtagaatctgcaagtggatatttggatagctgtgaagatttctttggaaacgggaatatcttcctataaaatctagacagaagcattctcagaaactgctctgtgatgtctgcattcaagtcacagagttgaacattgcctttcatagagcaggtttgaaacgctctttttgtagtatatggaagtagacgtttcggacggtttgaggcccatggtgataaagggaatatcttgccctacaagctagaaagaagcattctgtgaaacttgtttgtgatgtgtgtactcaactaacagagttgaacctttctttttacagagcagttttgaaacactgtttttgtagaatctgcgaggggatatttggagagacttcaggatttcgttggaaacgggaatatcttcatataaaatctcgacagaagcattctcagaaacttccttgtgatatgtgcattcaagtcacagagttgaatattccctttcacagagtaggtttgaaacactctttttgtagtatctggaagtggacatttggagcgcctggacgcctacggtgaaaaggcaaatatcttcccataaaaactagacagaagcattctgtgaaacttgtttgtgatgtgtgtactcaagtaacagagttgaacctttctattgacagaacagttttgaaacagtctttctgtggaatctgcaagtggatatttggatagcttggaggatttcgttggaaacgggattacgtataaaaagtagacagcagcatcctcagaaacttccttgtgatgtgtgcattcaagtcacagagttgaacattccctttcgtacagcagttttgaaacactctttctgtagtatctggaagtgaacattaggacagctttcaggtctatggtgagaaaggaaataccttcaaataaaaactagacagaagcattctcataaacttgtttgtgatgtgtgaactcagctaacagacgtggatctttcttttgatacagcagttttgaaaaacactttttgttgaatctgcaagtagacatttggatagatttgaagatttcgttggaaacgggaatatcttcatatcaaatctagacagaagcattctcagaaacgtctttgtgatgtttgcattcaactcatagagttgaacattccctttcagagagcagctttgaagcactctttttgaagcatgtgcaagtggacatttggagcgccctgaggcctacggggaaaaagcaaatatcttcccataaccactagatagaaacattctcagaaactgctttatgacgtatgcactcacctaacagagaagaaccttccttttgacagagcagttttgatacactctttttgtagaatctgcaagtggatatttggatagctgtgaagatttctttggaaacgggaatatcttcctataaaatctagacagaagcattctcagaaactgctctgtgatgtctgcattcaagtcacagagttgaacattgcctttcatagagcaggtttgaaacgctctttttgtagtatatggaagtggacttatcggacggttggaggcccatggtgctaaagggaatatcttcccctacaagctagaaagaagcattctgtgaaacttgtttgtgatgtgtgtactcaactaacagagttgaaccttcctttttacagagcagttttgaaacactctttttgtagaatctgcgaggggatatttggatagatttcaggatttcgttggaaacgggaatatcttcatataaaatctcgacagaagcattctcagaaacttctttgtgatatgtgcattcaagtcacagagttgaatattccctttcacagagtaggtttgaaacacactttttgtagtatctggaagtggacatttggagcgcctttacacctacggtgaaaagggaaatatcttctcataaaaagtagacagaagcaatctcagaatcttctttgggatatatgcacgcagctaacagagttgaacctttctattgacagagcagttttgaaacagtctttctgtggaatctgcaagtggatacttggatagcttggaggatttcgttggaaacgggattacgtataaaaagtagacagcagcatcctcagaaacatccttgtgatgtgtgcattcaagtcacagagttgaacattccctttcgtacagcagttttgaaacactctttctgtagtatctggaagtgaattttaggacagctttcaggtctatagtgagaaaggatatatcttcaaataaaaactagacggaagcattctgataaacttgtttgtgaagtgtgatctcagctaacagaggtggatctttcttttgatagagcagttctgaaaaacactttgttgaatctggaagtggacatttggatagatttgaagatttcgttggaaacgggaatatcttcatatcaaatctagacagaagcattctcagaaacgtctttgtcatgtttgcattcaactcatagagttgaacattcccattcagagagcagctttgaaacactctttttgtagtatgtgcaagtggatatttggagcgctctgaggcctacggtgaaaaagcaaatatcttcccataaccactagacagaaacattctcagaaactcctttatgacgtatgcactcacctaacagagaagaaccttccatttgacagagcagttttgatacactctttttgtagaatctgcaagtggatatttggatagctgtgaagatttcgctggaaacgggaatatcttcctgtaaaatctagacagaagcattctcagaaactgctctgtgatgtctgcatacaagtcacagagttgaacattgcctttcatagagcaggtttgaaacgctctttttgtagtatatgtaagtagacgtttcggacggtttgaggcccatggtgataaagggaatatcttcccctacaagctagaaagaagcattgtgtgaaacttgtttgtgatgtgtgtactcaactaacagagttgaacgtttgtttttacagagcagttttgaaacactctttttgtagaatctgcgaggggatatttggatacatttcaggatttcgttggaaacgggaatatcttcatataaaatctcgacagaagcattctcagaaacttctttgtgatatctgcctttaagtcacagagttgaatatcccctttcacagagtaggtttgaaacactctttttgtagtatctggaagtggacatttggagcgccttgacacctacggtgaaaagggaaatatcttcccataaaaactagacagaagcaatctcagaatcttctttgtgatatatgcacgcagctaacagagttgaacatttctattgacagagcagctttgaaacactcttttgtggaatctgcaagtggatatttggatagcttggaggatttcgttggaaacgggattacgtataaaaattagacagcagcatcctcagaaacttccttgtgatgtgtgcattcaagtcacagagttgaacattacctttcgtacagcatttttgaaacactctttctgtagtatctggaagtgaactttatgagagctttcaggtctatagtgagaaaggatatatcttcaaataaaaactagacagaagagttctgataaacttgtttgcgaagtgtgaactcaggtaacagaggtggatctttcttttgatacagcagttttgagaaacactttgttgaatctgcaagtggacatttggatagatttgaagatttcgttggaaacgggtatatcttcatatcaaatctagacagaagcattctcagaaacgtctttgtgatgtttgcattcaactcatagagttgaacattccctttcagagagcagctttgaagcactctttttgtagtatgtgcaagttgatatttggagcgctctgaggcctaaggtgaaaaagcaaatatcttcccataaccactagacagaaacattctcagaaactcctttatgacgtatgcactcacctaacagagaagaaccttccttttgactgagcaggtttgatacactctttttgtagaatctgcaagtggatatttggatagctgtgaagatttcgttggaaacgggaatatcttcctataaaatctagacagaagcattctcagaaactgctctgtgatgtctgcattcaagtcacagagttgaacattgcctttcatagagcaggtttgaaatgctctttttgtagtatatggaagtggatgtttcggacggttggaggcccatggtgataaagggaatatcttcccctacaagctagaaagaagcattgtgtgaaacttgtttgtgatgtgtgtactcaactaacagagttgaacctttctttttacagagcagttttgaaacactctttttgtagaatctgcgaggggatatttggatagatttcaagatttcgttggaaacgggaatatcttcatataaaatctcgacagatgcattctgagaaacttctttgtgatatgtgcattctagtcacagagttgaatattccctttcacagagtaggtttgaaacactctttttgtagtatctggaagtggacatttggagcgccttgacgcctacggtgaaaagggaaatatcttcccataaaaactagacagaagcaatctcagaatcgtcgttgggatatatgcacgcagctaacagagttgaacctttctatagacagagcagttttgaaacagtctttctgtgggatctgcaagtggatatttggatagcttggaggatttcgttaaaaacgggattacgtataaaaagtagacagcagcatcctcagaaacttctttgtgatgtgtgcattcaagtcacagagttgaacattccctttcgtacagcagttttgaaacactctttctgtagtatctggaagtgaacattaggacagctttcagctctatggtgagaaaggaaatatcttcaaacaaaaactagacagaagcattctcataaacttgtttgttatgtgtgaactcagctaacagaggtggatctttcttttgatagagcagttctgaaaaacacgttttgttgaatctgcaagtggacatttggatagatttgaagatgtcgttggaaacgggaatatcttcatatcaaatctagacagaagcattctcagaaacgtctttgtgatgtttccattcaactcatagagttgaacattccctttcagagagcagctttgaagcactctttttgtagtatgtgcaagtggatatttggagcgctctgaggcctacggtgaaaaagcaaatatcttcccataaccagtagacagaaacattctcagaaactcctttatgacgtatgtactcaactaacagagaaaaaccttccttttgacagagcagttttgatacactctttttgtagaatctgcaagtggatatttggatagctgtgaagatttcgttggaaacgggaatatcttcctataaaatctagacagaagcattctcagaaactgctctgtgatgtctgcattcaagtcacagagttgaacattgcctttcatagaggaggtttcaaacactctttttgtagtatatggaagtggacgtttcagacggtttgaggcccatggtgataaagggaatatcttcccctacaagctagaaagaagcattctgtgaaacttgtttgtgatgtgtgtactcaactaacagagttgaacctttctttttacagagcagttttgaaacactctttttgtagaatctgcgagggtatatttggatacatttcaggatttcgttggaaacgggaatatcttcatataaaatctcgacagaagcattctcagaaacttctttgtgatatgtgcattcaagtcacagagttgaatattccctttcacagagtaggtttgaaacactctttttgtagtatctggaagtggatatttggagcgccttgacgcctacggtgaaaagggaaatatcttcccataaaaactagacagaagcaatctcagaatcttctttgggatatatgcacgcagttaacagagttgaacctttctattgacagagcagttttgaaacagtctttctgtggaatctgcaagtggatatttggatagcttggaggatttcgttggaaacgggattaccgtatagaaagtagacagcagcatcgtcagaaacttctttgtgatgtgtgcattcaagtcacagagttgaacattccctttcgtacagcagttttgaaacactctttctgtagtatctggaagtgaacattaggacagctttcagctctatggtgagaaaggaaatatcttcaaataaaaactagacagaagcattctcataaacttgtttgtgatgtgtgaaatcagctaacagacgtggatctttcttttgatatagcagttttgaaaaacactttttgttgaatctgcaagtggacatttggatagatttgaagatttcgttggaaacgggaatatcttcatatcaaatctagacagaagcattctcggaaacgtctttgtgatgtttgcattcaactcatagagttgaacattccgtttcagagagcagctttgaagcactctttttgtagtatgtgcaaggggatatttggagcgctctgagtcctaaggtgaaaaagcaaatatcttcccataaccaatagacagaaacattctcagaaacccctttatgacgtatgtactcaaataacagagaaggaccgtccttttgacagagcagttttgatacactctttttgtagaatctgcaagaggatatttggatagctgtgaagatttcgttggaaacgggaataccttcctataaaatctagacagaagcattctcagaaactgctctgtgatgtctgcattcaagtcacagagttgaacattgcctttcctagagcaggtttgaaacgctctttttgtagtatatggaagtggatgtttcggacggttggaggcccatggtgataaagggaaaatcttcccctacaagctagaaagaagcattctgtgaaacttgtttgtgatgtgtgtactcaactaacacagttgaacctttctttttacagagcagttttgaaacactctttttgtagaatctgcgaggggatatttggatagatttcaggatttcgttggaaacgggaatatcttcatataaaatctcgacagaagcattctcagaaacttctttgtgatatctgcattcaagtcacagagttgaatattccctttcacagagtaggtttgaaacactctttttgtagtatctggaagtggacatttggagcgccgtgacacctacggtgaaaagggaaatatcttcccataaaaactagacagaagcaatctcagaatcttctttgggatatatgcacgcagctaacagagttgaacctttctattgacagagcagtttagaaacagtctttctgtggaatctgcaagtggatatttggatagcttggaggatttcgttggaaacgggattacgtataaaaagtagacagcagcatcctcagaaacttctttgtgatgtgtgcattcaagtcacagagttgaacattccctttcgtacagcagttttgaaacactctttctgtagtatctggaagtgaacattaggacagctttcaggtctatggggagaaaggaaatatcttcaaataaaaactagacagaagcattctcataaacttctttgtgatgtgtgaactcagctaacagaggtggatctttcttttgatagagcagttctgaataacactttttgttgaatctgcaagtggacatttggatagatttgaagatttcgttggaaacgggaatatcttcatatcaaatctagacagaagcattctcagaaacgtctttgtgatgtttgcattcaactcatagagttgaacattccgtttcagagagcagctttgaggcactctttttctagtatgtgcaagtggatatttggagcgctctgaggcctacggtgaaaaagcaaatatcttcccataaccactagaccgaaacattctcagaaactcctttatgacgtatgcactcacctaacagagaagaaccttccttttgacagagcagttttgatacactctttttgtagaatctgcaagtggatacttggatagctgtgaagatttcgttggaaacgggaatatcttcctataaaatctagacagaagcattctcagaaactgctatgtgatgtctgcattcaagtcacagagttgaacattgcctttcctagagcaggtttgaaacactctttttgtagtatatggaagtggacgtttcggacggtttgaggcccatggtgataaagggaatatcttcccctacaagctagaaagaagcattctgtgaaacttgtttgtgatgtgtgtactcaactaacagagttgaacctttctttttacagagcagttttgaaacactctttttgtagaatctgcgaggggatatttgtatagatttcaggatttcgttggaaacgggaatatcttcatataaaatctcgacagaagcattctcagaaacttctttgtgatatgtgcattcaagtcacagagttgaatattccctttcacagagtaggtttgaaacactctttttgtagtatctggaagtggacatttggggcgccttgacgcctatggtgaaaagggaaatatcttcccataaaaactagacagaagcaatctcagaatcttctttgggatatatgcacgcagctaacagagttgaacctttctattgacagagcagttttgaaacagtctttctgtggaatctgcaagtggatatttggatagcttggaggatttcgttggaaacgggattacgtataaaaagtagactgcagcatcctcagaaacttctttgtgatgtgtgcattcaagtcacagtgttgaacattccctttcgtacagcagttttgaaacactctttctgtagtatctggaagtgaacattaggacagctttcaggtatatggtgagaaaggaaatatcttcaaataaaaactagacagaagcattctcataaacttgttcgtgatgcgtgaactcagctaacacacgtggatctttcttttgatagagcagttctgaaaaacactttttgttgaatctgcaagaggacatttggatagatttgaagatttcgttggaaacgggaatatcttcatatcaaatctagacagaggcattctcagaaacgtctttgtgatgtttgcattcaactcatagagttgaacattccctttcagagagcagttttgaagcactctttttgtagtatgtgcaagtggatatttggagcgctctgacgcctacggggaaaaagcaaatatcttcccataaccactagacagaaacattctcagaaactcctttatgacgtatgcactcacctaacagaagaagaaccttccttttgacagagcagttttgatacactctttttgtagaatctgcaagaggatatttggatagctgtgaagatttcgttggaaacgggaatatcttcctataaaatctagacagaagcattctcagaaactgctctgtgatgtctgcattcaagtcacagtgttgaacgttgcctttcatagagcaggtttcaaacactctttttttagtatatggaagtggacgtttcggacggtttgaggaccatggtgataaaggaaatatcttcccctacaagctagaaagaagcattgtgtgaaactagtttgtgatgtgtgtactcaactaacagagttgaacctttctttttacagagcagttttgaaacactctttttgtagaatctgcgaggggatatttggatacatttcaggatttcgttggaaacgggaatatcttcatataaaatgtcgacagaagcattctcagaaacttctttgtgatatctgccttcaagtcacagaggtgaatattccctttcacagagtaggtttgaaacactctttttgtagtatctggaagtggacatttggagcgccttgacgcctacggtgaaaagggaaatatcttcccataaaaactagacagaagcaatctcagaatcttctttgggatatatgcacgcagctaacagagttgaacctttctattgacagagcagttttgtaacagtttttctgtggaatctgcaagtggatatttggatagcttggaggatttcgttggaaacgggtttacgtataaaaagtagacagtagcatccacagaaacttctttgtgatgtgtgcattcatgtcacagtgttgaacattccctttcgtacagcagttttgaaacactctttctgtagtatctctaagtgaacattaggacatctttcaggtctatggtgagaaaggaaatatcttcaaataaaaactagacagaagcatactcataaacttgtttgtgatgtgtgcactcagctaacagaggtggatctttcttttgatagagcagttctgaaaaacactttttgttgaatctgcaagtggacatttggatagatttgaagatttcgttggaaacgggaatatcttcatatcaaatctagacagaagcattctcagaaacgtctttgtgatgtttgcattcaactcatggagttgaacattcggtttcagagagcagctttgaggcactctttttgtagtatgtgcaagtggatatttggagcgctctgaggcctacggtgaaaaagcaaatatcttcccataaccactagacagaaacattctcagaaactcctttatgacgtatgcactcacctaacagaaaagaaccttccttttgacagagcagttttgatacactctttttgaagaatctgcaagtggatatttggatagctgtgaagatttcgttggaaacgggaatatcttcctataaaatctagacagaagcattctcagaaactgctctgtgatgtctgcattcaagtcacagagttgaacattgcttttcatagagcgggtttgaaacgctctttttgtagtatatggaagtagacgtttcggacggtttgaggcccatggtgataaagggaatatcttcccctacaagctagaaagaagcattctgtgaaacttgtttgtgatgtgtgtactcaactaacagagttgaacctttctttttacagagcagttttgaaacactctttttgtagaatctgcgaggggatatttggatagatttcacgatttcgttggaaacgggaatatcttcatataaaatctcgacagaagcattgtcagaaacttctttgtgatatgtgcattcaagtcacagagttgaatattccctttcacagagtaggtttgaaacaccctttttgtagtatctggaagtggacatttggagcgccttgacacctacggtgaaaagggaaatatcttcccataaaaactagacagaagcaatctcagaatcttctttgggatatatgcacgcagctaacagagttgaacctttctattgacagagtagttttgaaacagtctttctgtggaatctgcaagtggatatttggatagcttggaggatttcgttggaaacgggattacgtataaaaagtagacagcagcatcctcagaaacttctttgtgatgtgtgcattcaagtcacagagttgaacattcccttttgtacagcagttttcaaacactctttctgtagtatctggaagtgaacattaggacagctttcagctctatggtgagaaaggaaatatcttcaaataaaaactagacagaagcattctcataaacttgtttgtgatgtgtgaactcagctaacagaggtggatctttcttttgatagagcatttctgaaaaacactttttgttgaatctgcaagtggacatttggatagatttgaagatttcgttggaaacgggaatatcttcatatcaaatctagacagcagcattctcagaaacgtctttgtgatgtttgcattcaactcatagagttgaacattccctttcagagagcagctttgaagcactctttttgtagtatgtgcaagtggatatttggagcgctctgaggcctacggtgaaaaagcaaatatcttcccataaccactaggcagaaacattctcagaaactcctttatgacgtatgcactcacctaacagagaagaaccttccttttgacacagcagttttgatacactctttttgtagaatctgcaagtggatatttggatagctgtgaatatttcgttggaaacgggaatatcttcctataaaatctagacagaagcattctcagaaactgctctgtgatgtctgtattcaagtcacagagttaaacattgcctttcatagagcaggtttgaaacgctctttttgtagtatatggaagtggatgtttcggacggttggaggcccatggtgataaagggaatatcttcccctacaagctagaaagaagcattctgtgaaacttgtttgtgatgtgtgtactcaactaacagagttgaacctttctttttacagagcagttttgaaacactctttttgtagaatctgcgagcggatatttggatacatttcagcatttcgttggaaacgggaatatcttcatataaaatctcgacagaagcattctcagaaacttctttgtgatatgtgcattcaagtcacagagttgaatattccctttcacacagtaggtttgaaacactctttttgtagtatctggaagtggacatttggagcgccttgacgcctacggtgaaaagggaaatatcttcccataaaaactagacagaagcaatctcagaatcttctttgggatatatgcacgcagctaacagagttgaacctttctattgacagagcagttttgaaacagtctttctgtggaatctgcaagtggatatttggatagcttggaggatttcgttggaaaagggattacgcataaaaagtagacagcagcatcctccgaaacttctttgtgatgtgtgcattcaagtcacagagttgaacattccctttcgtacagccgttttgaaacactctttctgtagtatctggaagagaacattaggacagctttcagctctatggtgagaaaggaaatatcttcaaataaaaactagacagaagcattctcataaacttgtttgtgaagtgtgaactcagctaacacaggtggatctttcttttgatacagcagtattgaaaaacactttgttgaatctgcaagtggacatttggatagatttgaagatttcgttggaaacgggaatatcttcatatcaaatctagacagaagcattctcagaaacgtctttgcgatgtttgcattcaactcatagagttgaacattccgtttcagagagcagctttgaggcactctttttgtagtatgtgcaagtggatatttggagcgctctgaggcctacggtgaaaaagcaaatatgttcccataaccactagacagaaacattctcagaaactcctttatgatgtatgcactcacctaacagagaagaaccttccttttgacagagcagttttgatacactctttttgtagaatctgcaagtggatatttggatagctgtgaaggtttcgttggaaacgggaatatcttcctataaaatctagacagaagcattctcagaaactgctctgtgatgtctgcattcaagtcacagagttgaacattgcctttcatagagcaggtttgaaacgctctttttgtagtacatggaagtaaacgtttcggacggtttgaggcccatggtgataaagggaatatcttcccctacaagctagaaggagcattctgtgaaacttgtttgtgatgtgtgtactcaactaacagagttgaacctttctttttacagagcagttttgaaacactctttttgtagaatctgcgaggggatatttggatagatttcaggatttcgttggaaactggaatatcttcatagaaaatctcgacagaagcattctcagaaacttctttgtgatatgtgcattcaagtcacagaattgaatattccctttcacagagtaggtttgaaacactctttttgtagtatccggatgtggacatttggagcaccttgacgcctacggtgaaaagggaaatatcttcccataaaaactagacagaaacaatctcagaatcttctttgggatatatgcacgcagctaacagagttgaacctttctattgacagagcagttttgaaacagtctttctggggaatctgcaagtggatatttggatagcttggaggatttcgttggaaacgggattacgtataaaaagtagacagcagcatcctcagaaacttctttgtgatgtgtgcattcaagtcacagagttgaacattccctttcgtacagcagttttgaaacactctttctatagtatctggaagtgaacattaggacagctttcagctctatggtgagaaaggaaatatcttcaaataaaaactagacagaaagcattctcataaacttgtttgtgatgtgtgaactcagctaacagaggtggatctttcttttgatagagcagttctgaaaaacactttttgttgaatctgcaagtggacatttcgatagatttgaagatttcgttggaaacgggaatatcttcatatcaaatctagacagaagcattctcagaaacgtctttgtgatgtttgcattcaactcatagagttgaacattccgtttcagagagcagctttgaggcactctttttgtagtatgtgcaagtggatatttggagcgctctgaggcctacggtgaaaaagcaagtatcttcccataaccactagacagaaacattctcagaaactcctttatgacgtatgcactcacctaacagagaagaaccttccttttgacagagcagttttgatacactctttttgtaaaatctgcaagtggatatttggatagctgtgaagatttcgttggaaacgggaatatcttcctataaaatctagacagaagcattctcagaaactgctctgtgatgtctgcattcaagtcacagagttgaacattgcctttcatagagcaggtttgaaacgctctttttgtagtatatggaagtagacgtttcggacggtttcaggcccatggtgataaagggaatatcttcccctacaagctagaaagaagcattctgtgaaacttgtttgtgatgtgtgtactcaactaacagagttgaacctttctttttacagagcagttttgaaacactctttttgtagaatctgcgaggggatatttggatacatttcagcatttcattggaaacgggaatatcttcatataaaatctcgacagaagcattctcagaaacttctttgtgatatgtgcattcaagtcacagatttgaatgttccctttcacagagaaggtttgaaacactctttttgtagtatctggaagtggacatttggagcgccttgacgcctacggtgaaaagggaaatatcttcccataaaaactagacagaagccatctcagaatcttctttgggatatatgtacgcagctaatagagttgaacctttctattgacagagcagttttgaaacagtctttctgtggaatctgcaagtggatatttggatagcttggaggatttcgttggaaacgggattacgtataaaaagtagacagcagcatcctctgaaacttctttgtgatgtgtgcattcaagtcacagagttgaacattccctttcgtacagcagttttgaaacactctttctgtagtatctggaagtgaacattaggacagctttcaggtctatggtgagaaaggaaatatcttcaaataaaaactagacagaagcattctcataaacttgtttgtgatgtgtgaactcaactaacataggtggatctttcttttcatacagcagttttgaaaaacactttttgttgaacctgcatgtggacatgtggatagatttgaagatttcgttggaaacgggaatatcttcatgtaaaatctagacagaagcattctcagaaacgtctttgtgatgtttgcattcaactcatagagttgaacattccctttcagagagcagctttgaagcactctttttgtagtatgtgcaagtggatatttggagcgctctgaggcctacggtgaaaaagcaaatatcttcccataaccactacacagaaacattctcagaaactcctttatgacgtatgcactcacctaacagagaagaaccttccgtttgacagagcagttttgatacactctttttgtagaatctgcaagtggatatttggatagctgtgaagatttcgttggaaacgggaatatcttcctataaaatctagacagaagcattctcagaaactgctctgtgatgtctgcattcaagtcacagagttgaacattgcctttcatagagcaggtttgaaacgctctttttatagtatatggaagtggacttatcggacggtttgaggcccatggtgataaagggaatatcttcccctacaagctagaaagaagcattgtgtgaaacttgtttgtgatgtgtgtactcaactaacagagttgaacctttctttttacagagcagttttgaaacactctttttgtagaatctgcgaggggatatttggatagatttcaggatttcgttggaaccgggaatatcttcatataaaatctcgacagaagcattctcagaaacttctttgtgatatctgcattcaagtcacagagttgaatattccctttcaccgagtaggttagaaacactctttttgtagaatctggaagtggacatttggagcgccttgacgcctacggtgaaaagggaaatatcttcccattaaaactagacagaagcaatctcagaatcttctttgggatatatgcacgcagctaacagagttgaacctttctattgacagagcagttttgaaacagtctttctgtggaatctgcaagtggatatttgggatagcttggaggatttcgttggaaacgggattacgtataaaaagtagacagcagcatcctcagaaacttctttgtgatgtctgcattcaaatcacagagttgaacattccctttcgtacagcagttttgaaacactctttctgtagtatctggaagtgaacatttggacagctttcaggtctatggtgagaaaggaaatatcttcaaataaaaactagacagaagcattctcataaacttgtttgtgatgtgtgaactcagctaacagacgtggatctttcttttgatagagcagttttgaaaaacactttttgttgaatctgcaagtggacatttggatagatatgaagatttcgttggaaacgggaatatcttcatatcaaatctagacagaagcattctcagaaacgtctttgtgatgtttgcattcaactcatagagttgaaaattccgtttcagagagcagctttgaagcactctttttgtagtatgtgcaagtggatatttggagcgctctgaggcctacggggaaaaagcaaatatcttcccataaccactagacagaaacattctcagaaactcctttatgacgtatgcactcacctaacaggagtaagaaccttccttttgacagagcagttttgatacactctttttgtagaatctgcaagtggatatttggatagctgtgaagatttcgttggaaacgggaatatcttcctataaaatctatacagaagcattctcagaaactgctttgtgatgtctgcattcaagtcacagagttgaacattgcctttcctagagcaggtttgaaatgatcttttttagtatatggaagtggacgtttcagacggtttgaggcccatggtgttaaagggaatatcttcccctacaagctagaaagaagcattctgtgaaacttgtttgtgatgtgtgtactcaactaacagagttgaacctttctttttacagagcaattttgaaacactctttttgtagaatctgcgaagggatatttggatagatttcaggatttcgttggaaacgggagtatcttcatataaaatctcgacagaagcattctcagaaacttctttgtgatatctgcattcaagtcacagagttgaatattccctttcacagagtaggtttgaaacactctttttgtagtatctggaagtggacattttgagcgccttgacacctacggtaaaaagggaaatatcttcccataaaaactagacagaagcaatctcagaattttctttgggatatatccacgcagctaacagagttgaacctttctattgacagagcagttttgaaacagtctttctgtggaatctgcaagtggatatttggatagcttggaggatttcgttggaaacgggattacgtataaaaagtagacagcagcatcctcagaatcttctttgtgatgtgtgcattcaagtcacagagttgaacattccctttcgtacagcagttttgaaacactctttctgtagtatctggaagtgaacattaggacagctttcagctctatggtgagaaaggaaatatcttcaaataaaaactagacagaagcattctcataaacttgtttgtgttgtgtgaactcagctaacagaggtggatctttcttttgatagagcagttctgaaaaacactttttgttgaatctgcaagtggacatttggatagatttgaagatttcgttggaaacgggaatatcttcgtatcaaatctagacagaaagcattctcagaaacgtctttgtgatgtttgcattcaactcatagagttgaacattccgtttcagagagcagctttgaagcactctttttgtagtatgtgcaagtggatatttggagcgctctgaggcctacggtgaaaaagcaaatatcttcccataaccactagacagaaacattctcagaaactcctttatgacgtatgcactcacctaacagagaagaaccttccttttgacagagcagttttgatacactctttttgtagaatctgcaagtggatatttggatagctgtgaagatttcgttggaaacgggaacatcttcctataaaatctagacagaagcattctcagaaactgctctgtgatgtctgcattcaagtcacagagttgaacattgcctttcatagagcaggtttgaaacgctctttttgtagtatatggaagtggatgtttcggacggtttgaagcccatggtgataaagggaatatcttcccctacaagctagaaagaagcattctcataaacttgtttgtgatgtgtgtactcaactaacagagttgaacctttctttttacagagcagttttgaaacactctttttgtagaatctgcaaggggatatttggatacatttcaggatttcgttggaaacgggaatatcttcatataaaatctcgacagaagcattctcagaaacttctttgtgatatgtgcattcaagtcacagagttgaatattccctttcacagagtaggtttgaaacactctttttgtagtatctggaagtggacatttggagcgccttgacgcctacggtgaaaagggaaatatcttctcataaaaattagacagaagcaatctcagaatcttctttgggatatatgcacgcagttaacagagttgaacctttctattgacagagcagttttgaaacagtctttctgtggaatctgcaagtggatatttggatagcttggaggatttcgttggaaacgggattacgtatagaaagtagacagcagcatcctcagaaacttctttgtgatgtgtgcattcaagtcacagagttgaacattccctttcgtacagcagttttgaaacactctttctgtagtatctggaagtgaacattaggacagctttcaggtctatggtgagaaaggaaatatcttcaaataaaaactacacagaagcattctcataaacttgtttgtgatgtgtgaactcagctaacagaggcggatctttctgttgatagagcagttcggaaaaacactttttgttgaatctgcaagtggacatttggatagatttgaagatttcgttggaaacgggaatatcttcatatcaaatctagacagaagcattctcagaaacgtctttgtgatgtttgcattcaactcatagagttgaacattccgtttcagagagcagctttgaggcactctttttgtagtatgtgcaagtggatatttggagcgctctgaggtctacggtgaaaaagcaaatatcttcccataaccactagacagaaacattctcagaaactcctttatgacgtatgcactcacctaacagagaagaaccttccttttgacagagcagttttgatacactccttttgtagaatctgcaagtggatatttggatagctgtgaagatttcgttggaaacgggaatatcttcctataaaatctagacagaagcattctcagaaactgctctgtgatgtctgcattcaagtcacagagttgaacattgtctttcatagagcaggtttgaaacgctctttttgtagtatatggaagtggatgtttcggacggttggaggcccatggtgataaagggaatatcttcccctacaagctagaaagaagcattctgtgaaacttgtttgtgctgtgtgtactcaactaacagagttgaacctttctttttacagagcagttttgaaacacactttttgtagaatctgcgaggggatatttggatagatttcaggatttcgttggaaacgggaatatcttcatataaaatctcgacagaagcattctcagaaacttctttgtgatatctgcattcaagtcacagagttgaatattccctttcacagagtaggtttgaaacactctttttgtagtatctggaagtggacatttggagcgccttgacacctacggtgaaaagggaaatatcttctcataaaaactagacagaagcaatctcagaatcttctttgtgatatatgcacgcagctaacagagttgaacctttctattgactgagcagatttgaaacagtctttctgtggaatctgcaagtggatatttggatagattggaggatttcgttggaaacgggattacgtataaaaagtacacagcagcatcctcagaaacatctttgtgatgtgtgcattcaagtcacagagttgaacattccctttcgtacagcagttttgaaacactctttctgtagtatctggaagtgaacattaggacagctttcaggtctatggtgagaaagaaaatatcttcaaataaaaactagacagaagcattctcataaacttgttttggatgtgtgaactcagctaacagaggtggatctttcttttgatagagcagttctgaaaaacactttttgttgaatctgcaagtggacatttggatagatttgaagatttctttggaaacgggaatatcttcatatcaagtctagacagaagcattctcagaaacgtctttttgatgtttgcattcaactcatagagttgaacattccctttcagagagcagctctgaagcactctttttgtagtatgtgcaaggggatatttggagcgctctgaggcctacggtgaaaaaccaaatatcttcccataacgactagacagaaacattctcagaaactcctttatgaagtatgtactcaactaacagagaagaaccttccttttgacagagcagttttgatacactctttttgtagaatctgcaagtggatatttggatagctgtgaagatttcgttggaaacgggaatatcttcctataaaatctagacagaagcattctcagaaactgctctgtgatgtctgcattcaagtcacagagttgaacattgcctttcatagagcaggtttcaaacactctttttttagtatatggaagtggacctttcggacggtttacggcccatggtgataaaggaaatatcttcccctacaagctagaaagaagcattctgtgaaacttgtttgtgatgtgtgtactcaactaacagagttgaacctttctttttacagagcagttttgaaacactctttttgtagaatctgcgagggggtatttagatagatttcaggattccgttggaaacgggaatatcttcatataaaatctcgacagaagcattctcagaaacttcattgtgatatctgcattcaagtcacagagttgaatattccctttcacagagtaggtttgaaacactctttttgtagtatctggaagtggacatttggagcgccttgacgcctacggtgaaaagggaaatatcttcccataaaaactagacagaagcaatctcagaatcttctttgggatatatgtacgcagctaatagagttgaacctttctattgacagagcagttttgaaacagtctttctgtggaatctgcaagtggatatttggatagattggaggatttcgttggaaacgggattacgtataaaaagtagacagcagcatcctcagaaacttctttgtgatgtgtgcattcaagtcacagagttgaacattccctttcgtacagcagttttgaaacactctttctgtagtatctggaagtgaacattaggaccgctttcaggtctatggtgagaaaggaaatatcttcaaataaaaactagacagaagcattctgatatacttgtttgtgaagtgtgatctcagctaacagaggtggatctttcttttgatagagcagttctgaaaaacactttgttgaatctgcaagtggacatttggatagatttgaagatttcgttggaaacgggaatatcttcatatcaaatctagacagaagcattctcagaaacgtctttgtgatgtttgcattcaactcatagagttgaacattccgtttcagagagcagctttgaagcactctttttgtagtatgtgcaagtggatatttggagcgttctgaggcctacggggaaaaagcaaatatcttcccataaccactagacaaaaacattctcagaaactcctttatgacgtttgtactcacctaacagagaagaaccttccttttgacagagcagttttgatacactctttttgtagaatctgcaagtggatatttggatagctgtgaagatttcgttggaaacgggaatatcttcctataaaatctagacagaagcattctcagaaactgctctgtgatgtctgcattcaagtcacagagttgaacattgcttttcatagagcaggtttgaaacgctctttttgtagtatatggaagtagaagtttcggacggtttgaggcccatggtgataaagggaatatcttcccctacaagctagaaagaagcattctgtgaaacttgtttgtgatgtgtgtactcaactaacagagttgaacctttctttttacagagcagttttgaaacactctttctgtagaatctgcgaggggatatttggatagatttcaggatttcgttggaaacgggaatatcttcatagaaaatctcgacagaagcattctcagaaacttctttctgatatctgcattcaagtcacagagttgaatattccctttcacagagtaggtttgaaacactctttttgtagtatctggaagtggacatttggagcgccttgacacctacggtgaaaagggaaatatcttcccataaaaactagacagaagcaatctcagaatcttctttgggatatatgcacgcagctaacagagttgaacctttctattgacagagcagttttgaaacagtctttctgtggaatctgcaagtggatatttggatagcttgggggatttctttggaaacgggattacgtataaaaagtagatagcagcatcctcagaaacttctttgtgatgtgtgcattcaagtcacagagttgatcattccctttcgtacagcagttttgaaacactctttctgtagtatctggaagtgaacattaggacagctttcaggtctatggtgagaaaggaaatatcttcaaataaaaactagacagaagcattctcataaacttctttgtgatgtgtgaactcagctaacagaggtggatctttcttttgatagagcagttctgaaaaacactttttgttgaatctgcaagtggacattttgatagatatgaagatttcgttggaaacgggaatatcttcatatcaaatctagacagaagcattctcggaaacgtcgttgtgatgtttgcattcaactcatagagttgaacattccgtttcagagagcagctttgaggcactctttttgtagtatgtgcaagtggatatttggagcgctctgaggccttcggtgaaaaagcaaatatcttcccataaccactagacagaaacattctcagaaactcctttatgacgtatgcactcacctaacagagaagaaccttccttttgacagagcagttttgatacactctttttgtagaatctgcaagtggatatttggatagctgtgaagatttcgttggaaaagggaatatcttcctataaaatctagacagaagcattctcagaaactgctctgtgatgtctgcattcaagtcacagagttgaaaattacctttcatagagcaggtttgaaacgctctttttgtagtatatggaagtggatgtttcggacggttggaggcccatggtgataaagggaatatcttcccctacaagctagaaagtagcattctgtgaaacttgtttgtgatgtgtgtactcaactaacagcagttgaacctttcttttcacagagcagttttgaaacactcttttcgtagaatctgcgaggggatatttggatagatttcagcatttcgttggaaacgggaatatcttcatataaaatctcgacagaagcattctcagaaacttctttgtgatatgtgcattcaagtcacagagttgaatattccctttcacagagtaggtttgaaacactctttttgtagtatctggaagtggatatttggagcgccttgacacctacggtgaaaagggagatatcttcccataaaaactagacagaagcaatctcagaatcttctttgggatatatgcacgcagctaacagagttgaacctttctattgaccgagcagttttgaaacagtctttctgtggaatctgcaagtggatatttggatagcttggaggatttcgttggaaacgggattaagtataaaaagtagacagcagcattctcagaaacttcgttgtgatgtgtgcattcatgtcacagagttcaacattccctttcatacagcaggtttcaaacactctttctgtagtatctagaagtgaacattaggagagctttcaggtctgcggtgagaaaggaaatatctaaaaataaaaactagacaggaagcattctcataatcttgtttgtgatgtctgaactcagctaacagaggtggatctttcttttgatagagcagttctgaaaaacactttttgttgaatctgcaagtggacatttggatagatttgaagatttcgttggaaacgggaatatcttcatatcaaatctagacagaagcattctcagaaacgtctttgtgatgtttgcattcaactcatagagttgaacattccctttcagagagcagctttgaagcactctttttgtagtatgtgcaagtggatatttggagtgctctgaggcctacggtgaaaaagcaaatatcttcccataaccactagacagaaacattctcagaaactcctttatgacgtatgcactcacctaacagagaagaaccttccttttgacagagcagttttgatacactctttttgtagaatctgcaagtggatattttgatacctgtgaatatttcgttggaaacgggaatatcttcctataaaatctagacagaagcattctcagaaactgctctgtgatgtctgcattcaagtcacagagttgaaaattgcctttcatagagcaggtttgaaacgctctttttgtagtatatggaagtggatgtttcggacgcttggaggcccatggtgataaagggaatatcttcccctacaagctagaaagaagcattcctgtgaaacttgtttgtgatgtgtgtactcaactaacagagttgaacctttctttttacagagcagttttgaaacactctttttgtagaatctgcgaggggatatttggatacatttcaggatttcgttggaaacgggaatatcttcatataaaatctcgacagaagcattctaagaaacttctttgtgatatctgcattcaagtcacagagttgaatattccctttcacagagtaggtttgaaacactctttttgtagtatctggaagtggacatttggagcgccttgacgcctacggtgaaaagggaaatatcttcccataaaaactagacagaagcaatctcagaatcttctttgggatatatgcacgcagctaacagagttgaacctttctattgacagagcagttttgaaacagtctttctgtggaatctgcaagtggatatttggatagcttggaggatttctttggaaatgggactacgtgtaaaaagtagacagcagcatcctcagaaacttctttgtgatgtgtgcattcaagccacagatttgaacattccctttcgtacagcagttttgaaacactctttctgtagtatctggaagtgaacattaggacagctttcaggtctatggtgagaaaggaaatatcttcaaataaaaactagacagaagcattctcataaacttgtttgtgatgtgtgaactcagctaacagaggtggatctttcttttgatagagcagttctgaaaaacacgttttgttgaatctgcaagtggacatttggatagatttgaagatttctttggaaaagggaatatcttcatatcaaatctagacagaagcattctcagaaacgtctttgtgatgtttgcattcacctcatagagttgaacattccgtttcagagagcagctttgaagcactctttttgtagtatgtgcaagtggatatttggagcgctgtgaggcctacagtgaaaaagcaaatatcttcccataaccactagacagaaacattctcagaaactcctttatgacgtatgtactcacctaacagagaagaaccttccttttgacagagcagttttgatacactctttttgtagaatctgcaagtggatatttggatagctgtgaagatttctttggaaacgggaatatcttcctataaaatctagacagaagcattctcagaaactgctctgtgatgtctgcattcaagtcacagagttgaacattgcctttcatagagcaggtttgaaacgctctttttgtagtatatggaagtggacatatcggacggtttgaggcccatggtgataaagggaatatcttcccctacaagctagaaagaagcattctgtgaaacttgtttgtgatgtgtgtactcaactaatagagttgaacctttctttttacagagcagttttgaaacactctttttgtagaatctgcgaggggatatttggatagatttcaggatttcgttggaaacgggaatatcttcatttaaaatctcgacagaagcattctcagaagcttctttgtgatatgtgcattcaagtcacagagttgaatattccctttcacagagtaggtttgaaacactctttttgtattatctggaagtggacattttgagcaccttgacgcctacggtgaaaagggaaatatcttctcataaaaagtagacagaagcaatctcagaatcttctttgggatatatgtacgcagctaatagagttgaacctttctattgacagagcagttttgaaacagtctttctggggaatctgcaagtggatatttggatagcttggaggatttcgttggaaacgggattacgtataaaaagtagacagcagcatcctcagaaacatccttgtgatgtgtgcattcaagtcacagagttgaacattccctttcgtacagcagttttgaaacactctttctgtagtatctggaagtgaactttaggacagctttcaggtctatagtgagaaaggatatatcttcaaataaaaactagatggaagaattctgataaacttgtttgtgaagtgtgaactcagctaacagaggtggatctttcttttgatacagcagttttgaaaaacactttgttgaatctgcaagtggacatttggatagatttgaagatttcgttggaaacaggaatatcttcatatcaaatctagacagaagcattctcagaaacgtctttgtgatgtttgcattcaactcatagagttgaacattccgtttcagagagcagctttgaagcactctttttgtagtatgtgcaagtggatatttggagcgctgtgatgcctacggtgaaaaagcaaatatcttcccataaccactagacagaaacattctcagaaactcctttatgacgtatgcactcacctaacagaaaagaaccttccttttgacagagcagttttgatacactctttttgtagaatctgcaagtggatatttggatagttgtgaagatttcgttggaaacaggaatatcttcctataaaatctagacagaagcattctcagaaactgctctgtgatgtctgcattcaagtcacagagttgaacattgcctttcatagagcaggtttgaaatgctctttttgtagtatatggaagtggacgtttcagacggtttgaggcccatggttttaaagggaatatcttcccctacaagctagaaagaagcattctgtgaaacttgtttgtgatgtgtgtactcaactaacagagttcaacctttctttttacagagcagttttgaaacactctttttgtagaatctgcgaggggatatttggatacatttcaggatttcgttggaaacgggaatatcttcatataaaatctcgacagaagcattctcagaagcttctttgtgatatgtgcattcaagtcacagagttgaatattccctttcacagagtaggtttgagacactctttttgtagtatctggaagtggacatttggagcaccttgacgcctacggtgaaaagggaaatatcttctcataaaaagtagacagaagcaatctcagaatcttctttgggatatatgtacgcagctaacagagttgaacctttctattgagagagcagttttgaaacagtctttctgtggaatctgcaagtggatatttggatagcttggaggatttcgttggaaacgggattacgtataaaaagtagacagcagcatcctcagaaacttctttgtgatgtgtgcattcaagtcacagagttgaactttccctttcgtacagcagttttgaaacactctttctgtagtatctggaagtgaacattaggacagctttcaggtctatggtgagaaaggaaatatcttcaaataaaaactagacagaagcattctcataaactggtttgtgatgtgtgaactcagctaacagaggtggatctttcttttgatagagcagttctgaaaaacactttttgttgaatctacaagtggacatttggatagatttgaagatttcgttggaaacgggaatatcttcatatcaaatctagacagaagcattctcagaaacgtctttgtcatgtttgcattcaactcatagagttgaatattccctttcagagagcagctttgaagaactctttttgtaatatgtgcaagtggacatttggagcgctatgaggcctacggggaaaaagcaaatatcttcccataaccactagacagaaatattctcagaaactcctttatgacgtatgcactcagctaacagagaagaaccttccttttgacagagcagttttgatacactctttttgtagaatctgcaagtggatatttggatagctgtgaagatttcgttggaaacgggaatatcttcctataaaatctagacagaagcattctcagaaactgctctgtgatgtctgcattcaagtcacagagttgaacattgcctttcctagagcaggtttgaaacgctctttttgtagtatatggaagtggacgtttccgacgctttgaggcccatggtgataaagggaatatcttcccctacaagctagaaagaagcattctgtgaaacttgtttgtgatgtgtgtactcaattaacagagttgaacctttctttttacagagcagttttgaaacactctttttgtagaatctgcgaggggatatttggatacatttcaggatttcgttggaaacgggaatatcttcatataaaatctcgacagaagcattctcagaagcttctttgtgatatgtgcattcaagtcacagagttgaatattccctttcacagagtaggtttgaaacactctttttgtagtatctggaagtggacatttggagcaccttgacgcctacggtgaaaagggaaatatcttctcataaaaagtagacagaagcaatctcagaatcttctttgggatatatgtacgcagctaacagagttgaacctttctattgacagagtagttttgaaacagtctttctgtggaatctgcaagtggatatttggatagcttggaggatttcgttggaaacgggattacgtataaaaagtagacagcagcatcctcagaaacttctttgtgatgtgtgcattcatgtcacagtgttgaacattccctttcgtacagccgttttgaaacactctttctgtagtatctctaagtgaatattaggacatctttcaggtctatggtgagaaaggaaatatcttcaaataaaaactagacagaagcattctcataaacttgtttgtgatgtgtgaactcagctaacagaggtctatctttcttttgatagagcagttctgaaaaacactttttgttgaatctgcaagtggacatttggatagatttgaagatttcgttggaaacgggaatatctttatatcaaatctagacagaagcattgtcagaaacgtctttgtgatgtttgcattcaactcatagagttgaacattcccttccagagagtagctttgaagcactctttttgtagcatgtgcaagtggacatttggagcgccctgaggcctacggggaaaaagcaaatatcttcccataaccactagacagaacattctcagaaactcctttatgacgtatgcactcacctaacagagaagaaccttccttttgacagagcagttttgatacactctttttgtagaatctgcaagtggatatttggatacctgtgaagatttcgttggaaacgggaatatcttcctataaaatctagacagaagcattctcagaaactgctctgtgatgtctgcattcaagtcacagagttgaacattgcctttcatagagcaggtttgaaacgctctttttgtagtatatggaagtggacttatcggacggtttaaggcccatggtgataaagggaatatcttcccctacaagctagaaagaagcattctgtgaaacttgtttgtgatgtgtgtactcaactaacagagttgaacctttctttttacagagcagttttgaaacactctttttgtagaatctgcgaggggatatttggatagatttcaggaatttcgttggaaacgggaatatcttcatatataaatctcgacagaagcattctcagaaacttctttgtgatatgtgcattcacgtcacagagttgaatattccctttcacagagtaggtttgaaacactctttttgtagtatctggaagtggacatttggagcgccttgacgcctacggtgaaaagggaaatatcttcccataaaaactagacagaagcaatctcagaatcttctttgggatatatgcacgcagctaacagagttgaatctttctattgagagagcagatttgaaacagtctttctgtggaatctgcaagtggatatttggatagattggaggatttctttggaaatgggattacgtataaaaagtagacagcagcatcctcagaaacttctttgtgatgtgtgcattcaagtcacagagttgaacattccctttcgtacagcagttttgaaacactctttctatagtatctggaagtgaacattaggacagctttcaggtctatggtgagaaaggaaatatcttcaaataaaaattagacagaagaattctgataaacttgtttgtgaagtgtgaactcagctaacacaggtggatctttcttttgatacagcagttttgaaaaacactttggtgaatctgcaagtggacatttggatagatttgaagatttcgttggaaacgggtatatcttcataacaaatctagacagaagcattctcagaaaacgtctttgtgatgtttgcattcaactcatagagttgaacattccgtttcagagagcagctttgaggcacactttttgtagtatgtgcaagtggatatttggagcgctctgaggcctacggtgaaaaagcaaatatcttcccataaccactagacagaaacattcccagaaactcctttatgacgtatgcactcacctaacagagaagaaccttccttttgacagagcagttttgatacactctttttgtagaatctgcaagtggatatttggatagctgtgaaggtttcgttggaaacgggaatatcttcctataaaatctagacagaagcattctcagaaactgctctgtgatgtctgcattcaagtcacagagttgaacattgcctttcatagagcaggtttgaaatgctctttttgtagtatatggaagtggacgtttcggacggtttgaggcccatggtgataaagggaatatcttcccctacaagctagaaagaagcattctgtgaaacttgtttgtgatgtgtgtactcaactaacagagttgaacctttctttttacagagcagttttgaaacactctttttgtagaatctgcgaggggatatttggatagatttgaggatttcgttggaaacgggaatatcttcatagaaaatctcgacagaaacattctcagaaacctctttgtgatatctgcattcaagtcacagagttgaatattccctttgacagagtaggtttgaaacactccttttgtagtatctggaagtggacatttggagcaccttgacgcctacggtgaaaagggaaatatcttcccataaaaactagacagaagcaatctcagaatcttctttgggatatatgcacgcagctaacagagttgaacctttctattgacagagcagttttgaaacagtctttctgtggaatctgcaagtggacatttggacagcttggaggatttcgttggaaacgggattacgtataaaaagtagacagcagcatcctcagaaacttctttgtgatgtgtgcattcaagtcacagagttgaacattccctttcgtacagcagttttgaaacactctttctatagtatctggaagtgaacattaggacagctttcaggtctatggtgagaaaggaaatatcttcaaataaaaactagacagaagcattctcataaacttgtttgtgatgtgtgaactcagctaacagacgtggatctttcttttgatacagcagttttgaaaaacactttttgttgaatctgcaagtggacatttggatagatttgaagatttcgttggaaacgggaatatcttcctataaaatctagacagaagcattctcagaaacgtctttgtgatgtttgcattcaactcatggagttgaacattccgtttcagagaccagctttgaagcactctttttgtagtatgtgcaagtggatatttggagcgctctgaggcctacggtgaaaaagcaaatatcttcccataaccactagacagaaacattctcagaaactcctttatgacgtatgtactcaactaacagagaagaaccttccttttgacagagcagttttgatacactctttttgtaggatctgcaagtggatatttggatagctgtgaagatttcgttggaaacgggaatatcttcctataaaatctagacagaagcattctcagaaaccgctctgtgatgtctgcattcaagtcacagagttgaacattgcctttcctagagcaggtttgaaacgctctttttgtagtatatggaagtggacgtttcggacggtttgaggcccatggtgataaagggaatatcttcccctacaagctagaaagaagcattctgtgaaacttgtttgtgatgtgtgtactcaactaacagcagttgaacctttctttttacagagcagttttgaaacactctttttgtagaatctgcgaggggatatttggatagatttcaggatttcgttggaaacgggaatatcttcatataaaatctcgacagaagcattctcagaaacttctttgtgatatgtgcattcaagtcacagagttgaatattccctttcacagagtaggtttgaaacactctttttgtagtatctggaagtggacatttggagcgccttgacgccgacggtgaaaagggaaatatcttcccataaaaactagacagaagcaatctcagaatcttctttgggatatatgcacgcagctaacagagttgaacctttctattgacagagcagttttgaaacagtctttctgtggaatctgccagtggatatttggatagcttggaggatttcgttggaaacgggattaagtataaaaagtagacagcagcatcctccgaaacttctttgtgatgtgtgcattcaagtcacagagttgaacattccctttcgtacagcagttttgaaacactctttctgtagtatctggaagtgaacattaggacagctttcaggtctatggtgagaaaggaaatatcttcaaataaaaactagacagaagcattctcataaacttgtttgtgatgtgtgaactcagctaacagaggtggatctttcttttgatagagcagttctgaaaaacactttttgttgaatctgcaagtggacatttggatagatttgaagatttcgttggaaacgggaatatcttcataccaaatctagacagaagcattctcagaaacgtctttgtcatgtttgcattcaactcatagagttgaacattccctttcagagagcagctttgaaacactctttttgtagtatgtgcaagtggatatttggagcgctctgaggcctaaggtgaaaaagaaaatatcttcccataaccactagacagaaacattctcagaaactcctttatgacgtatgcactcacctaacagagaagaaccttccttttgacagagcagttttgatacactctttttgtagaatctgcaagtggatatttggatacctgtgaagatttcgatggaaacgggaatatcttcctataaaatctagacagaagcattctcagaaacagctctgtgaagtctgcattcaactcacagagttgaacattgcgtttcatagagcaggtttgaaacgctctttttgtagtatatggaagtggacgtttcggacggtttgagacccatggtgataaagggaatatattcccctacaagctagaaagaagcattctgtgaaacttgtttgtgatgtgtgtactcaactaacagagttgtacctttcttttcacagagcagttttgaaacactctttttgtagaatctgcgaggggatatttggatagatttcaggatttccttggaaacgggaatatcttcatataaaatctcgacagaagcattctcagaaacttctttgtgatatctgcattcaagtcacagagttgaatattccctttcacagagtaggtttgaaacactctttttgtagtatctggaagtggacttttggagcaccttgacacctatggtgaaaagggaaatatcttccgataaaaactagacagaagcaatctcagaatcttctttgggatatatgcacgcagctaacagagttgaacctttctattgacagagcagttttgaaacagtctttctgtggaatctgcaagtggatatttcgatggcttggaggatttcgttggaaacgggattacgtataaaaagtagacagcagcatcctcagaaacttctttgtgatgtgtgcattcaagtcacagagttgagcattccctttcatacagcagttttgaaacactctttctgtagtatctggaagtgaacattaggacagctttcagctctatggtgagaaaggaaatatcttcaaataaaaactagagagaagcattctcataaacttgtttgtgatgtgtgaactcagctaacagaggtggatctttctttggatagagcagttctgaaaaacactttttgttgaatctgcaagtggacatttggatagatttgaagatttcgttggaaacgggaatatcttcatatcaaatctagacagaagcattctcagaaacgtctttgtgatgtttgcattcaacccatagagttgaacattccgtttcagagagcagctttgaagcgctctttttgtagtatgtgcaaggggatattttgagcgctctgaggcctaaggtgaaaaagcaagtatcttcccataaccactagacagaaacattctcagaaactcctttatgacgtatgcactcacctaacagagaagaaacttccttttgacagagcagttttgatacactctttttgtagaatctgcaagtggatatttggatagctgtgaagatttcattggaaacgggaatatcttcctgtaaaatctagacagaagcattctcagaaactgctctgtgatgtctgcattcaagtcacagagttgaacattgcctttcatagagcaggtttgaaacgctctttttgtagtatatggaagtggatgtttcagacggtttgaggcccatggtgataaagggaatatcttcccctacaagctagaaagaagcattgtgtgaaacttgtttgtgatgtgtgtactcaactaacagagttgaacctttctttttacagagcagttttgaaacactctttttgtagaaactgcgaggggatatttggatacatttcaggatttcgttggaaacgggaatatcttcatataaaatctcgacagaagcattctcagaaacttctttgtgatatgtgcattcaagtcacagagttgaatattccctttcacagagtaggttggaaacactctttttgtagtatctggaagtggacatttggagcgccttgacacctacggtgaaaagggaaatatcttcccataaaaactagacagaagcaatctcagaatcttctttgggatatatgcacgaagctaacagagttgaacctttctattgacagagcagttttgaaacagtctttctgtggaatctgcaagtggatatttggatagcttggaggatttcgttggaaacgggattatgtataaaaagtagacagcagcatcctcagaaacttctttgtgatgtgtgcattcaagccacagatttgaacattccctttcgtacagcagttttgaaacactctttctgtagtatctggaagtgaacattaggacagctttcaggtccatggtgagaaaggaaatatcttcaaataaaaactagacagaagcattctcataaacttgtttgtgatgtgtgaactcagctaacagaggtggatctttcttttgatagagcagctctgaaaaacactttttgttgaatctgcaagtggacatttggatagatttgaagatttcgttggaaacgggaatatcttcatatcaaatctagacagaagcattctcagaaacgtctttgtgatgtttgcattcaacccatagagttgaacattccgtttcagagagcagctttgaagcactctttttgtagtatgtgcaaggggatatatggagcgctctgaggcctaaggtgaaaaagcaaatatcttcccataaccactagacagaaacattctcagaaactcctttatgacgtatgcactcacctaacagaaaagaaccttccttttgacagagcagttttgatacactctttttctggaatctgcaagtggatatttggatagctgtgaagatttcgttggaaacgggaatatcttcctataaaatctagacagaagcattctcagaaactgctctgtgatgtctccattcaagtcacagagttgaacattgcctttcatagagcaggtttgaaacgctctttttgtagcatatggaagtggatgtttcggacggttggaggcccatggtgataaagggaatatcttcccctacaagctagaaagaagcattctgtgaaactagtttgtgatgtgtgtactcaactaacagagttgaacctttctttttacagagcagttttgaaacactctttttgtagaatctgcgaggggatatttggatagatttcaggatttcgttggaaacgggaatatcttcatataaaatctcgacagaagcattctcagaaacttctttgtgatatgtgcattcaagtcacagagttgaatattccctttcacagagtaggtttgaaacactctttttgtagtatctggaagtggacatttggagcgccctgacgcctacggtgaaaaggaaaatatcttctcataaaaagtagacagaagcaatctcagaatcttctttgggatatatgcacgcagctaacagagttgaacctttctattgacagagcagttttgaaacagtctttctgtggaatctgcaagtggatatttggatagcttggaggatttcgttggaaacgggattacgtatgaaaagtagacagcagcatcctcagaaacttctttgtgaggtgtgcattcaagtcacagagttgaacattcgctttcgtgcagcagttttgaaacactctttctgtagtatctggaagtgaacattaggacagctttcaggtctatggtgagaaaggaaatatcttcaaataaaaactagacagaagcattctcataaacttgtttgtgatgtgtgaactcagctaacagaggtgtatctttcctttgatagagcagttctgaaaaacacgttttgttgaatctgcaagtggacattttgatagatttgaagatttcgttgcaaacgggaatatcttcatatcaaatctagacagaagcattctcggaaacgtctttgtgatgtttgcattcaacacatagagttgaacattccgtttcagagagcagctttgaagcactctttttgtagtatgtgcaagtggatatttggagcactctgagacctagggtgaaaaagcaaatatcttcccataaccactagacagaaacattctcagaaactcctttatgacgtatgtactcaactaagagagaagaactttccttttgacagagcatttttgatacactctttttgtactatctgcaagtggatatttggatagctgtgaagatttcgttggaaacgggaatatcttcctataaaacctagacagaagcattctcagaaactgctctgtgatgtctgcattcaagtcacagagttgaacattgcctttcctagagcaggtttgaaacgctctttttgtagtatatggaagtggacgtttcggagggtttgagacccatggtgataaagggaatatattcccctacaagctagaaagaagcattctgtgaaacttgtttgtgatgtgtgtactcaactaacagagttgaacctttctttttacagagcagttttgaaacactctttttgtagaatctgcgaggggatatttggatagattttaggatttcgttggaaacgggaatatcttcatataaaatctcgacaggaagcattctcagaaacttctttgtgatatgtgcattcgagtcacagagttgaatattccctttcacagagtaggtttgaaacactctttttgtagtatctggaagtggatatttggagcgccttgacacctacggtgaaaagggaaatatcttcccataaaaactagacagaagcaatctcagaattttctttgggatatatgcacacagctaacagagttgaacttttctattgacataccagttttgaaacagtctttctgtggaatctgcaagtggatatttggatagcttggaggatttcgttggaaacgggattacgtataaaaagtagacagcagcatcctcagaaacttctttgtaatgtgtgcattcaagtcacagagttgaacattccctttcgtacagcagttttgaaacactctttctgtagtatctggaagtgaacattaggacagctttcagctctatggtgagaaaggaaatatcttcaaataaaaactagacagaagcattctcataaacttgtttgtgatgtgtgaactcagctaacagaggtggatctttctcttgatagaggagttctgaaaaacactttttgttgaatctgcaagtggacatttggatagatttgaagatttcgttggaaacgggaatatcttcatatcaaatctagacagagaagcattctcagaaacgtctttgtgatgtttgcattcaactcatagagttgaacattccctttcagagagcagctttgaaacactctttttgtagtatgtgcaagtggatatttggagcgctctgaggcctacggtgaaaaagcaaatatcttcccataaccactagacagaaacattctcagaaactcctttatgacgtatgcactcacctaacagagaagaaccttccttttgactgagcagttttgatacactctttttgtagaatctgcaagtggatatttggatagctgtgaagatttcgttggaaacgggaatatcttcttataaaatctagacagaagcattctcagggaactgctctgcgatgtctgtattcaagtcacagagttgaacattgcctttcatagagcaggtttgaaacgctctttttgtagtatatggaagtggacgtttcggacggtttgaggcccatggtgataaagggaatatcttcccctacaagctagaaagaagcattctgtgaaacttgtttttgatgtgtgtactcaactaacagagttgaacctttctttttacagagcagttttgaaacactctttttgtagaatctgcgaggggatatttggatagatttcaggatttcgttggaaacgggaatatcttcatataaaatctcgacagaagcattctcagaaacttctttgtgatatgtgcattcaagtcacaggtttgaatattccctttcacagagtaggtttgaaacactctttttgtagtatctggaagtggatatttggagcgccttgacgcctaaggtgaaaagggaaatatcttcccataaaaactagacagaagcaatctcagaatcttctttgggatatatgcacgcagctaacagagttgaaccgttctattgacagagcagttttgaaacagtctttctgtggaatctgcaagtggatatttggatagcttggaggatttcgttggaaacgggattacatataaaaagtagacagcagcatcctcagaaacttctttgtgatgtgtgcattcaagtcacagagttgaacattccctttcgtacagcagttttgaaacactctttctgtagtatctggaagtgaacattaggacagctttcaggtctatggtgagaaaggatatatcttcaaataaaaactagacagaagcattctcataaacttgtttgtgatgtgtgaactctgctaacagaggtggatctttcttttgatagagcagttctgaaaaacactttttgttgaatctgcaagtggacatttggatagatttgaagatttcgttggaaacgggaatatcttcatatcaaattttgacagaagcattctcagaaacgtctttgtgatgtttgcattcaactcatagagttgaacattccctttcacagagcagctttgaaacactctttttgtagtatgtgcaagtggatatttggagcgctctgaggcctacggtgaaaaagcaaatatcttcccataaccactagacagaaacattctcagaaactcctgtatgacgtgtgcactcacctaacagagaagaaccttccttttgacagagcagttttgatacactctttttgtagaatctgcaagtggatatttggatagctgtgaagatttcgttggaaacgggaatatcttcctataaaatctagacagaagcattctcagaaactactctgtgatgtctgcattcaagtcacagagttgaacattgcctttcctagagcaggtttgaaacgctctttttgtagtatatggaagtggacgtttcggacggtttgaggcccatggtgataaagggaatatcttcccctacaagctagaaagaagcattctgtgaaacttgtttgtgatgtgtgtactcaactaacagagttgaacctttctttttacagagcagttttgaaacactctttttgtagaatctgcgaggggatatttggatagatttcaggatttcgttggaaacgggaatatcttcatgtaaaatctcgacagaagcattctcagaaacttctttgtgatatctgcattcaagtcacagagttgaatattccctttcacagagtaggtttgaaacactctttttgtagtatctggaagtggacatttggagcgccttgacacctacggtgaaaagggaaatatgcttcccataaaaactagacagaagcaatctcagaatcttctttgggatatatgcacgcaactaacagagttgaacctttctattgacagagcagttttgaaacagtctttctgtggaatctgcaagtggatatttggatagcttggaggatttctttggaaatgggattacgtataaaaagtagacagcagcatcctcagaaacttctttgtgatgtgtgcattcaagtcacagagttgaacattccctttcgtacagcagttttgaaacactctttctgtagtatctggaagtgaacattaggacagctttcaggtctatggtgagaagggaaatatcttcaaataaaaactagacagaagcattctcataaacttgtttgtgatgtgttaacacagctaacagaggtggatctttcttttgatagagcagttctgaaaaacactttttgttgaatctgcaagtggacatttggatagatttgaagatttctttggaaacgggaatatcttcatatcaaatctagacagaagcattcccagaaacgtctttgtgatgtttgcattcaactcatagagttgaacattccctttcagagagcagctttgaagcactctttttgtaggatgtgcaaggggatatttggagtgctctgaggcctaaggtgaaaaagcaaatatcttcccataaccactagacagaaacattgtcagaaactcctttatgacgtatgcactcacctaacagagaagaaccttccttttgacagagcagttttgatacactctttttgtagaatctgcaagtggatatttggatagctgcgaagatttcgttggaaacgggaatatcttcctataaaatctagacagaagcattctcagaaactgctctgtgatgtctgcattcaagtcacagagttgaacattgcttttcctacagcaggtttgaaacgctctttttgtagtatatggaagtggacgtttcggacggtttgaggcccatggtgataaagggaatatctttccctacaagctagaaagaagcattctgtgaaacttgtttgtgatgtgtgtactcaactaacagggttgaacctttccttttacagagcagttttgcaacactctttttgtagaatctgcgaggggatatttggatagatttcaggatttcgttggaaacgggaatatcttcatataaaatctcgacagaagcattctcagaaacttctttgtgatatgtgcattcaagtcacagagttgaatattccctttcacagagtaggtttgaaacactctttttgtagtatctggaagtggacatttggagcgccttgacgcctacggtgaaaagggaaatatcttctcatgaaaactagacagaagcaatctcagaatcttctttgggatatatgcacgcagctaacagagttgaacctttctattgacagagcagttttgaaacagtctttctgtggaatttgcaagtggatatttggatagcttggaggatttcgttggaaacgggattaagtataaaaagtagacagcagcatcctcagaaacttctttgtgatgtgtgcattcaagtcacagagttgaacattccctttcgtacagcagttttgaaacactctttctgtagtacctggaagtgaacattaggacagctttcaggactatggtgagaaaggaaatatcttcaaataaaaactagacagaagcattctcataaacttgttcgtaatgtgtgtactcagctaacacacgtggatctttcttttgatagagcagttctgaaaaacactttttgttgaatctgcaagtggacatttggatagatttgaagatttcgttggaaacgggaatatcttcatatcaaatctagacagaagcattctcagaaacgtctttgcgatgtttgcattcaactcatagagttgaacattccgtttcagagagcagctttgaggcactctttttgtaatatgtgcaagtggatatttggagcgctctgaggcctacggtgaaaaagcaaatatcttcccataaccactagacagaagcattctcagaaactcctttatggcgtatgtactcaactaaaagagaagaaccttccttttgacagagcatttttgatacactctttttgtggaatctgcaagtggatatttggatagctgtgaagatttcgttggaaacgggaatatcttcctataaaatctagacagaagcattctcagaaactgctctgtgaagtctacattcaagtcacagagttgaacattgcctttcatagagcaggtttgaaacgctctttttgtagtatatggaagtggacgtttcggacggtttgaggcccatggtgataaagggaataacttcccctacaagctagaaagaagcattctgtgaaacttgtttgtgatgtgtgtactcaactaacagagttgaacctttctttttacagagcagttttgaaacactctttttgtagaatctgcgaggggatatttggatagatttcaggattttgttggaaacgggaatatcttcatataaaatctcgacagaagcattctcagaaacttcattgtgatatctgcatttaagtcacagagttgaatattcgctttcacagagtaggtttgaaacactctttttgtagtatctggaagtggacatttggagcgccttgacacctacggtgaaaagggaaatatcttcccataaaaactagacagaagcaatctcagaatcttctttgggatataagcacgcagctaacagagttgaacctttctattgacagagcagttttgaaacagtctttctgtggaatctgcaagtggatatttggatagcttggaggatttcgttggaaacgggattacgcataaaaagtagacagcagcatcctcagaaacttcgttgtgatgtgtgcattcaagtcacagagttgaacattccctttcgtacagcagttttgaaacactctttctgtagcatctggaagtgaacattaggacagctttcaggtctatggtgagaaaggaaatatcttcaaataaaaactagacagaagcattctcataaacttgttcgtgatgtgtgaactcagataagagccgtggatctttcttttgatagagcagttctgaaaaacactttttgttgaatctgcaagtggacatttggatagatttgaagatttctttggaaacgggaatatcttcatatcaaatctagacagaagcattctcggacacgtctttgtgatgtttgcattcaactcatagagttgaacattccgtttcagagagcagctttgaggcactcattttgtagtatgtgaaagtggatatttggagcgctctgaggccttcggtgaaaaagcaaatatcttcccataaccactagagagaagcattctcagaaactcctttatgacgtatgcactcacctaacagaaaagaaccttccttttgacagagcagttttgatacactctttttgtagaatctgcaagtggatatttggatagctgtgaagatttcgttggaaacgggaatatcttcctataaaatctatacagaagcattctcagaaactgctctgtgatgtctgcattcaagtcacagagttgaacattgcctttcatagagcaggtttgaaacgctctttttgtagtatatggaagtggacttttcggacggtttgaggcccatgttgataaagggaatatcttcccctacaagctagaaagaagcattctgtgaaacttgtttgtgatgtgtgtactcaactaacagagttgaacctttcttttcacagagcagttttgaaacactctttttgtagaatctgcgaggggaaatttggatagatttcaggatttcattggaaacgggaatatcttcatacaaaatctcgacagaagcattcccagaaacttctttgtgatatctgcattcaagtcacagagttgaatattccctttcacagagtaggtttgaaacactctttttgtagtatctggatgtgtacatttggagcgccttgacacctacggtgaaaagggaaatatcttcccataaaaactagacagaagtaatctcagaatcttctttgggatatatgcacggagctaacagagttgaacctttctattgacatagcagttttgaaacagtctttctgtggaatctgcaagtggatatttggatagcttggaggatttcgttggaaacgggattacgtataaaaattagacagcagcatcctcagaaacttctttgtgatgtgtgcattcaagtcacagagttgaacatcacctttcgtacagcagttttgaaacactcattcggtagtatctggaagtgaacattaggatagctttcaggtctatggtgagaaaggaaatatcttcaaataaaaactagacagaagctttctcataaacttgtttgtgatgtctgaactcagctaacagaggtggatctttcttttgatagagcagttctgaaaaacactttttgttgaatctgcaagtggacatttggatagatttgaagatttcgttggaaacgggaatatcttcatatcaaatctagacagaagcattcgcggaaacgtctttgtgatgtttgcattcaactcatagagttgaacattccctttcagagagcagctttgaagcactctttttgtagtatgtgcaaggggatatttggagcgctctgaggcctacggtgaaaaagcaaatatcttcccataaccactagacagaaacattctcagaaactcctttatgacgtatgcactcacgtaacagaaaagaaccttccttttgacagagcagttttgatacactctttttgtagaatctgcaagtggatatttggatagctgtgaagatttcgttggaaacgggaatatcttcctataaaatctagacagaagcattctcagaaactgctctgtgatgtctgcattcaagtcacagagttgaacattgcctttcatggagcaggtttgaaacgctctttttgtagtatatggaagtggacgtttcggacggtttgaggcccatggtgataaagggaatatcttcccctacaagctagaaggaagcattctgtgaaacttgtttgtgaggtgtgtactcaactaacagagttgaacctttctttttacagagcagttttgaaacactctttttgtagaatctgcgaggggatatttggatagatttcaggatttctttggaaacgggaatatcttcatataaaatctcgacagaagcattctcagaaacttctttgtgatatctgccttcaagtcacagagttgaatattccctttcacagagtaggtttgaaacactctttttgtagtatctggaagtggacatttggagcgccttgacacctacggtgaaaagggaaatatcttcccataaaaactagacagaagcaatctcagaatcttctttgggatatatgcacgcagctaacagagttgaacctttctattgacagagcagttttgaaacagtctttctgtggaatctgcaagtggatatttggatagcttggaggatttcgttggaaaagggattacgtttaaaaagtagacagcagcatcctcagaaacttctttgtgatgtgtgcattcaagtcacagagttgaacattccctttcgtacagcagttttgaaacactctttctgtagtatctggaagtgaacactaagacagctttcagatctatggtgagaaaggaaatatcttcaaataaaaactagacagaagcattctcataaacttgtttgtgatgtgtgaactcagctaacagagctggatctttcttttgatagagcagttctgaaaaacactttttgttgaatctgcaagtggacatttggatagatttgaagatttctttggaaacgggaatatcttcatatcaaatctagacagaagcattctcagaaacgtctttgcgatgtttgcattcaactcatagagttgaacattccgtttcagagaggagctttgaggcactctttttgtagtatgtgcaagtggatatttggagcgctctgaggcctacggtgaaaaagcaaatatcttcccataaccactagacagaaacattctcagaaactcctttatgacgtatgcactcacctaacagagaagaaccttccttttgacagagcagttttgatacactctttttgtagaatctgcaagtggatatttggatagctgtgaagatttggttggaaacgggaatatcttcctataaaatctagacagaagcattctcagaaactgctctgtgatgtctgcattcaagtcacagagttgaacactgcctttcctagagcaggtttgaaacgctctttttgtattatatggaagtggacgtttcggacggtttgaggcccatggtgataaagggaatatcttcccctacaagctagaaagaagcattctgtgaaacttgtttgtgatgtgtgtactcaactaacagagttgaacctttctttccacagagcagttttgaaacactctttttgtagaatctgcgaggggatatttggatagatttcagcatttcgttggaaacgggaatatcttcatataaaatctcgacagaagcattctcagaaacttccttgtgatatgtgcattcaagtcacagagttgaatattccctttcacagagtaggtttgaaacactctttttgtagtatctggaagtagacatttggagcgccttgacgcctacggtgaaaagggaaatatcttcccataaaaactagacagaagcaatctcagaatcttctttgggatatatgcacgcagctaacagagttaaacctttctattgacagagcagttttgaaacagtctttctgtggaatctgcaagtggatatttggatagcttggaggatttcgttggaaacgggattacgcataaaaagtagacagcagcatcctcagaaacttctttgtgatgtgtgcattcaagtcacagagttgaacattccctttcttacagcagttttgaaacactctttctgtagtatctggaagtgaacattaggacagctttcagctctatggtgagaaaggaaatatcttcaaataaaaactagacagaagcattctcataaacttgtttgtgatgtgtgaactcagctaacagaggtgcatctttcttttgatagagcagttctgaaaaacactttttgttgaatctgcaagtggacatttggatagatttgaacatttcgttggaaacgggaatatcttcatatcaaatctagacagaagcattcgcggaaacgtctttgtcatgtttgcattcaactcatagagttgaacattccgtttcagagagcagctttgaagcactctttttgtcgtatgtgcaagtggatatttggagcgctctgaggcctacggtgaaaaagcaaatatcttcccataaccactagacagaaacattctcagaaactcctttatgacgtatgcactcacctaacagagaagaaccttccttttgacagagcagttttgatacactctttttgtagaatctgcaagtggatatttggatagctgtgaagatttcgttggaaacgggaatatcttcctaaaaaatctagacagaagcattctcagaaactgctctgtgatgtctgcattcaagtcacagagttgaacattgcctttcatagagcaggtttgaaacgctctttttgtagtatatggaagtggaagtttcggacggttggaggcccatggtgataaagggaatatcttcccgtacaagctagaaagaagcattctgtgaaacttgtttgtgatgtgtgtactcaactaacagagttgaacctttctttttacagagcagttttgaaacactctttttgtagaatctgcgaggggatatttggatagatttcaggatttcgttggaaacgggaatatcttcatataaatctcgacagaagcattctcagaaacttctttgtgatatgtgcattcaagtcacagagttgaatattccctttcacagagtaggtttgaaacactcttttgtagtatctggaagtggacatttggagcgccttgacacctacggtgaaaagggaaatatcttcccataaaaactagacagaagcaatctcagaatcttctttgggatatatgcacgcagctaacagagttgaacctttctattgacagagcagttttgaaacagtctttctgtggaatctgcaagtggatatttggatagcttagaggatttcgttggaaacgggattacgtataaaaagtagacagcagcatcctcagaaacttctttgtgatgtgtgcattcaagtcacagagttgaacattccctttcgtacagcagttttgaaacactctttctgtagtatctgaagtgaacaataggacagctttcaggtctatgatgagaaagtaaatatcttcaaataaaaactagacagaagcattctcataaacttgtttgtgatgtgtgaactcagctaacacacgtggatctttcttttgatacagcagttttgaaaaacactttttgttgaatctgcaagtggacatttggatagatatgaagatttcgttggaaacgggaatatcttcatatcaaatctagacagaagcattctcagaaacgtctttgtgatgtttgcattcaactcatagagttcaacattccgtttcagagagcagctttgaagcactctttttgtagtatgtgcaaggggatatatggagcgctctgaggcctaaggtgaaaaagcaaatatcttcccataaccactagacagaaacattctcagaaactccgttatgacgtatgcactcacctaacagagaagaaccttccttttgactgagcagttttgatacactctttttgcagaatctgcaagtggatatttggatagctgtgaagatttcgttggaaacgggaatatcttcctataaaatctagacagaagcattctcagaaactgctctgtgatgtctgcattcaagtcacagagttgaacattgcctttcatagagcaggtttgaaactctctttttgtagtatatggaagtagacgtttcggacggtttgaggcccatggtgataaagggaatatcttcccctacaagctagaaagaagcattctgtgaaacttgtttgtgaagtgtgtactcaactaacagagttgaacctttctttttacagagcagttttgaaacactcttttgtagaatctgcgaggggatatttggatagatttcaggatttcgttggaaacgggaatatcttcatataaaatctcgacagaagcattctcagaaacttctttgtgatatctgccttcaagtcacagagttgaatattccctttcacagagtaggtttgaaacactctttttgtagtatctggaagtggacatttggagcgccttgacgcctacggtgaaaagggaaatatcttcccatgaaaactagacagaagcaatctcagtaatcttctttgggatatatgcacgcagctaaaagagttgaacctttctattgacagagcagttttgaaacagtctttctgtggaatctgcaagtggatatttggatagcttggaggatttcgttggaaacgggattacgtataaaaagtagacagcagcatcctcagaaacttctttgtgatgtgtgcattaaagtcacagagttgaacattccctttcgtacagcagttttgaaacactctttctgtagtatctggaagtgaacattaggacagctttcagctctatggtgagaaaggaaatatcttcaaataaaaactagacagaagcattctcataaacttgttcgtgatgtgtgaactcagctaacacacgtggatgtttcttttgatagagcagttctgaaaaacactttttgttgaatctgcaagaggacatttggatagatttgaagatttcgttggaaacgggaatatcttcatatcaaatctagacagaagcattctcagaaacgtcttttgtcatgtttgcattcaactcatagagttgaacattccctttcagagagcagctttgaagcactctttttgtagtatgtgcaaggggatatatggagcgctctgaggcctaaggtgaaaaagcaaatatcttcccataaccactagacagaaacattctcagaaacttctttatgacgtatgtactcaactagcagagaagaacattcaatttgacagagcatttttgatacactctttttgtagtatctgcaagtggatatttggatagctgtaaagatttcgttggaaacgggaatgtcttcctataaagtctaggcagaagcattctcagaaactgctctgtgatgtctgcattcaagtcacagagttgaacattgcctttcatagagcaggtttgaaacgctctttttgtagtatatggaagtgcacgtttcggacggtttgaggcccatggtgataaaggaaatatcttcccctacaagctagaaagaagcattctgtgaaacttgtttgtgatgtgtgtactcaactaacagagttgaacctttcttttcacagagcagttttgaaacactctttttgtagaatctgcgagcggatatttggatagatttcaggatttcgttggaaacgggaatatcttcatataaaatcgcgacagaagcattctcagaaacttctttgtgatatgtgcattcaagtcacagagttgaatattccctttcacagagtaggtttgaaacactctttttgtagtatctggaagaggacatttggagcgccttgacgcctacgttgaaaagggaaatatcttcccataaaaactagacagaagcaatctcagaatcttctttgggatatatgcacgcagctaacagagttgaacctttctattgacagagcagtattgaaacagtctttctgtggaatctgcaagtggatatttggatagcttggaggatttcgttggaaacgggattaagtataaaaagtagacagcagcatcctcagaaacttctttgtgatgtgtgcattcaagtcaccgagttgaacattccctttcgtacagcagttttgaaacactctttctgtagtaactggaagtgaacattaggacagctttcaggtctatggtgagaaaggaaatatcttcaaataaaaactagacagaagcattctcataaacttgtttgtgatgtgtgaactcagctaacagacgtggatctttcttttgatacagcagttttgaaaaacactttttgttgaatctgcaagtggacatttggatagatttgaagatttcgttggaaacgggaatatgttcatatcaaatctagacagaagcattctcagaaacgtctttgtcatgtttgcattcaactcatagagttgaacattccctttcagagagcagctttgaaagactctttttgtagtatgtgcaagtggatatttggagcgctctgaggcctacggtgaaaaagcaaatatcttcccataaccactagacagaaacattctcagaaacttctttatgacgtatgtactcaagtagcagagaagaactttccttttgacagagcactttggatacacactttttgtagtatctgcaagtggatatttggatagctgtgaagatttcgttggaaacgggaatatcttcctataaagtctggacaaaagcattctcagaaactgctctgtgatgtctgcattcaagtcacagagttgaacattgcctttcatagagcaggtttgaaacgctctttttgtagtatatggaagtggacgtttcggacggtttgaggcccatggtgataaagggaatatcgtcccctaccagctagaaagaagcattctgtgaaactcgtttgtgatgtgtgtactcaactaacagagttgaacctttcttttcacagagcagttttgaaacactctttttgtagaatctgcgaggggaaatttggatagatttcaggatttcgttggaaacgggaatatcttcatacaaaatctcgacagaagcattctcagaaacttcattgtgatatgtgcattcaagtcacaggagttgaatattcccttttacagagtaggtttgaaacactctttttgtagtatctggaagtggacatttggagcgctttgacgcctacggtgaaaagggaaatatcttctcataaaaactagacagaagcaatctcagaatcttctttgggatatatgcacgcagctaacagagttgaacctttctattgacagagcagttttgaaacagtctttctgtggaatctgcaagtggatatttggatagattggaggatttcgttggaaacgggattacgtataaaaagtagacagcagcatcctcagaaacttctttgtgatgtgtgcattcaagtcacagagttgaacattccctttcgtacagcagttttgaaacactctttctgtagtatctggaagtgaacattaggacagctttcagggctatggtcagaaaggaaatatcttcaaataaaaactagacagaagcattctgataaacttgtttgtgaagtgtgatctcagctaacagaggtggatctttcttttgatagagcagttctgaaaaacactttttgttgaatctgcaagtggacatttggatagatttgaagatttcgttggaaacgggaatatcttcatatcaaatctagacagaagcattctcagaaacgtctttgtgatgtttgcattcaactcatagagttgaacattccgtttcagagaacagctttgaagcactctttttgtagtatgtgcaagtggatatttggagcgctctgaggcctacggggaaaaagcaaatatcttcccataaccactagacagaaacattctcagaaactcctttatgacgtatgcactcacctaacagagaagaaccttccttttgacagagcagatttgatacactctttttgtagaatctgcaagtggatatttggatagctgtgaagatttcgttggaaacgggaatatcttcctataaaatctagacagaagcattctcagaaactgctctgtgatgtctgcattcaagtcacagagttgaacattgcctttcatagagcaggtttgaaacgctctttttgtagtatatggaagtggatgtttcggtcggttggaggcccatggtgataaagggaatatcttcccctacaagctagaaagaagcattctgtgaaacttgtttgtgatgtgtgtactcaactaacagagttgaacctttcttttcacagagcagttttgaaacactctttttgtagaatctgcgaggggatatttggatagatttcaggatttcgttggaaacgggaatatcttcatacaaaatctcgacagaagcattctcagaaacttctttgtgatatctgcattcaagtcacagagttgaatattcccttccacagagtaggtttgaaagactctttttgtagtatctggaagtggacatttggagcgccttgacgcctacggtgaaaagggaaatatcttcccataaaaactagacagaagcaatctcagaatcttctttgggatatatgcacgcagctaacagagttgaacctttctattgacagagcagttttgaaacagtctttctgtggaatctgcaagtggatatttggataacttggaggatttcgttggaaacgggattacgtataaaaagtagacagcagcatcctcagaaacttctttgtgatgtgtgcactgaagtcacagagttgaacattccctttcgtacagcagttttgaaacactctttctgtagtatctggaagtgaacattaggacagctttcaggtctatggtgagaaaggaaatatcttcaaataaaaactagacagaagcattctcataaacttgtttgtgaagtgtgaactcagctaacacaggtggatctttcttttgatacagcagttttgaaaaacactttgttgaatctgcaagtggacatttggatagatttgaagatttcgttggaaacgggtatatcttcataacaaatctagacagaagcattctcagaaacgtctttgtgatgtttgcattgaactcatagagttgaacattccctttcagagagcagctttgaagcactctttttgtagtatgttcaagtggacatttggagcgctttgaggcctacagggaaaaagcaaatatcttcccataacaactagacagaaacattctcagaaactcctttatgacgtatgcactcacctaacagagaagaaccttccttttgacagagcagttttgatacactctttttgtagaatctgcaagtggatatttggatagctgtgaagatttcgttggaaacgggcatatcttcctataaaatctagacagaagcattgtcagaaactgctctgtgatgtctgcattcaagtcacagagttgaacattgcctttcatagagcaggtttgaaacgctctttttgtaggatatggaagtggacttatcggacggtttgaggcccatggtgataaagggaatatcttcccctacaagctagaaagaagcattctgtgaaacttgtttgtgatgtttgcactcaactaacagagttgaacctttctttttacagagcagttttgaaacactctttttgtagaatctgcgaggggatatttggatacatttcaggatttcgttggaaacgggaatatcttcatataaaatctcgacagaagcattctcagaaacttcattgtgatatctgcattcaagtcacagagttgaatattccctttcagagagtaggtttgaaacactctttttgtagtatctggaagtggacatttggagcgccttgacacctacggtgaaaagggaaatatcttcccattaaaactagacagaagcaatctcagaatcttctttgggatatatgcacgcagctaacagagttgaacctttctattgacagagcagttttgaaacagtctttctgtggaatctgcaagtggatatttggttagcttggaggatttcgttggaaacgtcattacgtataaaaagtagacagcagcatcctcagaaacttctttgtgatgtgtgcattcaagtcacagagttgaacattccctttcgtacagcagttttgaaacactctttctgtagtatctggaagtggacattaggacagctttcaggtctatggtgagaaaggaaatatcttcaaataaaaactagacagaagcattctcataaacttgtttgtgatgtgtgaactcagctaacagaggtggatctttcttttgatagagcagttctgaaaaacactttttgttgaatctgcaagtgcacatttggatagattagaagatttcgttggaaacgggaatatcttcatatcaaatctagacagaagcattctcagaaaccgtcgttgtgatgtttgcattcaactcatagagttgaacattccgattcagagagcagctttgaggcactctttttgtagtatgtgcaagtggatatttggagcgctctgaggcctacggtgaaaaagcaaatatcttcccataaccactagacagaaacattctcagaaactcctttatgacgtatgcactcacctaacagaggagaaccttccttttgacagagcagttttgatacactctttttgtagaatctgcaagtggatatttggatagctgtgaagatttcgttggaaacgggaatatcttcctataaaatctagacagaagcattctcagaaactgctctgtgatgtctgcattcaagtcacagagttgaacattgcctttcatagagcaggtttgaaacgctctttttgtagtatatggaagtggacgtttcggacggtttgaggccaatggtgataaagggaatatcttcccctacaagctagaaagaagcattctgtgaaacttgtttgtgatgtgtgtactcaactaacagagttgaacctttctttttacagagcagttttgaaacactctttttgtagaatctgcgaggggatatttggatagacttcaggatttcgttggaaacgggaatatcttcatataaaatctcgacagaagcattctcagaaacttctttgtgctatctgcattcaagtcacagagttgaatattccctttcacagagtaggtttgaaacactctttttgtagtatctggaagtggacatttggagcgccttgacacctaaagtgaaaagggaaatatcttcccataaaaactagacagaagcaatctcagaatcttctttgggatatatgtacgcagctaatagagttgaacctttctattgacagagcagttttgaaacagtctttctgtggaatctgcaaggggatatttggatagcttggaggatttcgttggaaacgggattactgtataaaaagtagacagcagcatcctcagaaacttctttgtgatgtgtgcattcaagtcacagagttgaacattccctttcgtacagcagttttgaaacactctttctgtagtatctggaagtgaaccattaggacagctttcagctctatggtgagaaaggaaatatcttcaaataaaaactagacagaaacattctcataaacttgtttgtgatgtgtgaactcagctaacagaggtggatctttcttttgatagagcagttctgaaaaacactttttgttgaatctgcaagtggacatttggatagatttgaagatttcgttggaaacgggaatatcttcatatcaaatctagacagaagcattctcagaaacgtctttgcgatgtttgcattcaactcatagagttgaacattccgtttcagagagcagctttgaggcactctttgtagtatgtgcaagtggatatttggagcgctctgaggcctacggtgaaaaagcaaatatcttcccataaccactagacagaaacattctcagaaactcctttctgacgtatgcactcacccaacagagaagaaccttccttttgacagagcagttttgatacactctttttgtagaatctgcaagtggatattgggatagctgtgaagatttcgttggaaacgggaatatcttcctataaaatctagacagaagcattctcagaaactgctctgtgatgtctgcattcaagtcacagagttgaacattgcttttcatagagcaggtttgaaacggtctttttgtagtatatggaagtagacgtttcggacggtttgaggcccatggtgataaagggaatatcttcccctacaagctagaaagaagcattctgtgaaacttgtttgtgatgtgtgtactcaactaacagagttgaacctttctttttacagagcagttttgaaacactctttttgtagaatctgcgaggggatatttggatagatttcaggattttgttggaaaccggaatatctttatataaaatctggacagaagcattctcagaaacttctttgtgatatctgcattcaagtcacagagttgaatattcccttccacagagtaggtttgaaacactctttttgtggtatctggaagtggacatttggagcgccttgacgcctacggtgaaaagggaaatatcttcccataaaaactagacggaagccatctcagaatcttctttgggatatatgcacgcagctaacagagttgaacctttctattgacagagcagttttgaaacagtctttctgtggaatctgcaagtggatatttggatagcttggaggatttcgttggaaacgggattacgcataaaaagtagacagcagcatcctcagaaaattctttgtgatgtgtgcattcaagtcacagagttgaacattccctttcgtacagcagttttgaaacactctttctgtagtatctggaagtgaacattaggacagctttcaggtctttggtgagaaaggaaatatcttcaaataaaaactagacagaagcattctcataaacttgtttgtgatgtgtgaagtcagctaacagaggtggatctttcttttgatagagcagttctgaaaaacactttttgttgaatctgcaagtggacatttggatagatttgaagatttcgttggaaacgggaatatcttcatatcaaatctagacagaagcattctcagaaacgtctttgcgatgtttgcattcaactcatagagttaaacattccgtttcagagagcagctttgaagcactctttttgtagtatgtgcaagtggatatttggagcgctctgaggcctacggtgaaaaagcaaatatcttcccataaccactagacagaaacattctcagaaactcctttatgacgtatgcactcacctaacagagaagaaccttccttttgacagagcagttttgatacacactttttgtagaatctgcaagtggatatttggatagctgtgaagatttcgttggaaacgggaatatcttcctataaaatctagacagaagcattctcagaaactgctctgtgatgtctgcattcaagtcacagagttgaacattgactttcatagagcaggtttgaaacgctctttttgtagtatataaaagtggacgtttcggacggtttgaggcccatggtgataaagggaatatcttcccctacaagctagaaagaagcattctgtgaaacttgtttgtgatgtgtgtactcaactaacagagttgaacctttctttttacagagcagttttgaaacactctttttgtagaatctgcgaggggatatttggatacatttcagcatttcgttggaaacgggaataaattcatataaaatctcgacagaagcattctcagaaacttctttgtgatatcctgcattcaagtcacagagttgaatattccctttcacagagtaggtttgaaacactctttttgtagtatctggaagtggacatttggagcgccttgacgcctacagtgaaaagggaaatatcttcccataaaaactagacagaagcaatctcagaattttctttgggatatatgcacatagctaacagagttgaacctttctttttacagagcagttttgaaacactctttttgtagaatctgcaagtggatatttggatagcttggaggatttcgttggaaacgggattacgtataaaaagtagacggcagcatcctcagaaacttctttgtgatgtgtgcattcaagtcacagagttgaacattccttttcgtacagcagttttgaaacactctttctgtagtatctggaagtgaacattaggacagctttcaggtctatggtgagaaaggaaatatcttcaaataaaaactagacagaagcattctcataaacttgtttgtgatgtgtgaactcagctaacagaggtggatctttcttttgatagagcagttctgaaaaacacttttggttgaatctgcaagtggacatttggatagatttgaagatttcgttggaaacttgaatatcttcatatcaaatctagagagaagcattctcagaaacgtctttgtgatgtttgcattcaactcatagagttgaacattccgtttcagagagcagctttgaagcactctttttgtagtatctgcaagtggatatttggagtgctctgaggcctacggtgaaaaagcaaatatcttcccataaccactagacagaaacattctcagaaactcctttatgacgtatgtactcaactaacagagaagaaccttccttttgacagagcagttttgatacactctttttgtagaatctgcaagtgcatatttggatagctgtgaagatttcgttggaaactggaatatcttcctataaaatctagacagaagcattctcagaaactgctctgtgatgtctgcattcaagtcacagagttgaacattgcctttcatagagcaggtttgaaacgctctttttgtagtatatggaagtagacgtttcggacggcttgaggcccatggtgataaagggaatatcttcccctacaagctagaaagaagcattctgtgaaacttgtttgtgatgtgtgtactcaactaacagtgttgaacctttctttttacagagcagttttgaaacactctttttgtagaatctgcgaggggatatttggatagatttcaggatttcgttgggaacgggaatatcttcatataaaatctcgacagaagcattctcagaaacttctttgtgatatgtgcattcaagtcacagagttgaatattccctttcacagagtaggtttgaaacactctgtttgtagtatctggaagtggacatttggagcgccttgacgcctacggtgaaaagggaaatatcttcccataaaaactagacagaagcaatctcagaatcttctttgggatatatgcacgcagctagcagagttgaacctttctattgacagagcagttttgaaacagtctttctgtggaatctgcaagtggatatttggatagcttggaggatttcgttggaaacgggattacgtataaaaagtagacagcagcatcctcagaaacttctttgtgatgtgtgcattcaagtcacagagttgaacattccctttcgtacagcagttttgaaacactctttctgtagtatctagaagtgaacattaggacagctttcagctctatggtgagaaaggaaatatcttcaaataaaaactagacagaagcattctcataaacttgtttgtgatgtgtgaactcagctaacagaggtggatctttcttttgatagagcagttctgaaaaacactttttgttgaatctgcaagtggacatttggatagatttgaagatttcgttggaaacgggaatatcttcatatcaatctagacagaagcattctcagaaacgtctttgtgatgtttgcattcaactcatagagttgaacattccgtttcagagagcagctttgaggcacactttttgtagtatgtgcaagtggatatttggagcgctctgaggcctacggtgaaaaagcaaatatcttcccataaccactagacagaaacattctcagaaactgctttatgacgcatgcactcacctaacagagaagaaccttccttttgacagagcagctttgatacactctttttgtagaatctgcaagtggatatttggatagctgtgaagatttcgttggaaacgggaatatcttcctataaaatctagacagaagcattctcataaactgctctgtgatgtctgcattcaagtcacagagttgaacattgcctttcctagagcaggtttgaaacgctctttttgtagtatatggaagtggacgtttcggacggtttgaggcccatggtgataaagggaatatcttcccctacaagctagaaagaagcattctgtgaaacttgtttgtgatgtgtgtactcaactaagagagttgaacctttcttttcacagagcagttttgaaacactctttttgtagaatctgcgaggggatatttggatagatttcaggatttcgttggaaacgggaatatcttcatacaaaatctcgacagaagcattctcagaaacttctttgtgatatctgccttcaagtcacagagttgaatattccctttcactgagtaggtttgaaacactctttttgtagtatctggaagtggacatttggagcgccttgacgcctacggtgaaaagggaaatatcttcccataaaaactagacagaagcaatctcagaatcttctttgggatatatgcatgcagctaacagagttgaacctttctattggcagagcagttttgaaacagtctttctgtggaatctgcaagtggatatttggatagcttggaggatttcgttggaaacgggattaagtataaaaagtagacagcagcatcctcagaaacatccttgtgatgtgtgcattcaagtcacagagttgaacattccctttcgtacagcagttttcaaacactctttctgtagtatctggaagtgaactttaggagagctttcaggtctatagtgagaaaggatatatcttcaaataaaaactagacagaagcattctcataaacttgtttgtgatctgtgaactcagctaagagacgtggatctttcttttgatagagcagttctgaaaaacactttttgttgaatctgcaagtggacatttggatagatttgaagatttctttggaaacgggaatatcttcatatcaaatctagacagaagctttctcagaaacgtctttgtgatgtttgcattcaactcatagagttgaacattccgtttcagagagcagctttgaagcactctttttgtagtatgtgcaaggggatatttggagcgctctgagtcctaaggtgaaaaagcaaatatcttcccataaccaatagacagaagcattctgtgaaacttgtttgtgatgtgtttactcaactaacagagttgaacttttcttttgatagagcagttttcaaacattctttttgtagagtctgcaagtggatatttggctagctttgaggattttgttggaaacgggaatatcttcacataaaaactaggcagaagcattctctgaaacttctttgtgttgtttgcatttaactcacagagttgaacattccctttcatacagcagttctgaaacactcattttgtagtagatggaagtggacacttggactgcttcgaggcctatggtgaaaaaggtagtaccctcacataaaaactagacagaagcattctgtgaaacttgtttgtgatgtgtgtactcaactaacagacttgaacctttctttttacagagcagttttgaaacactctttttgtagaatctgcgaggggatatttggatagatttcaggatttcgttggaaaggggaatatcttcatataaaatctcgacagaagcattctcagaaacttctttgtgatatgtgcattcaagtcacagagttgaatattcccttttacacagtaggtttgaaacactctttttgtagtatctggaagtgaacatttggagcgccttgacgcctacggtgaaaagggaaatatcttctcataaaaagtagacagaagcaatctcagaatcttctttgggatatatgcacgcagctaacagagttgaacctttctattgacagagtagttttgaaacagtctttctgtggaatctgcaagtggatatttggatagcttggaggacttcgttggaaacgggattaagtataaaaagtagacagcagcatcctcagaaacttctttgtgatgtgtgcattcaagtcacagagttgaacattccctttcgtactgcagttttgaaacactctttctgtagtatctggaagtgaacattaggacagctttcagctctatggtgagaaaggaaatatcttcaaataaaaactagacagaagcattctcataaacttgttcgtgatgtgtgaactcagctaacacacgtggatctttcttttgatagagcagttctgaaaaacactttttgttgaatctgcaagaggacagttggatagatttgaagatttcgttggaaacgggaatatcttccatatcaaatctagacagaagcattctcagaaacgtctttgtgatgtttgcattcaactcatagagttgaacattccgtttcagagagcaggtttgaagcactctttttgtagtatgtgcaagtggatatttggagggctctgaggcctacggtgaaaaagcaaatatcttcccataaccactagacagaaacattctcagaaactcctttacgacgtatgcactcacctaacagaggagaaccttccttttgacagagcagttttgatacactctttttgtagaatctgcaagtggatatttggatagctgtgaagatttcgttggaaacgggaatatcttcctataaaatctagacagaagcattctcagaaactgctctgtgatgtctacattgaagtcacagagttgaacattgcctttcatagagcaggtttgaaacgctctttttgtagtatatggaagtggacgtttcggacggtttgaggcccatggtgataaagggaatatctttccctacaagctagaaagaagcattctgtgaaacttgtttgtgatgtgtgtactcaactaacagagttgaacctttctttttacagagcagtattgaaacactctttttgaagaatctgcgaggggatatttggatagatttcaggatttcgttggaaacgggaatatcttcatataaaatctcgacagaagcattctcagaaacttccttgtgatatgtgcattgaagtcacagagttgaatattccctttcacagagtaggtttgaaacactctttttgtagtatctggaagtggacatttggagcgccttgacgcctacggtgaaaagggaaatatctaccaataaaaactagacagaagcaatctcagaatcttctttgggatatatgcacgcagctaacagagttgaacgtttctattgacagagcaagttttgaaacagtctttctgtggaatctgcaagtggatatttggatagcttggaggatttcgttggaaacgggattacgtataaaaagtagacagcagcatcctcagaaacttctttgtgatgtgtgcattcaagtcacagagttgaacattccctttcgtacagcagttttgaaacactctttctgtagtacctggaagtgaacattaggacagctttcagctctatggtgagaaaggaaatatcttcaaataaaaactagacagaagcattctcatatacttgtttgtgatgtgtgaactcagctaacagaggtggatctttcttttgatagagcagttgtgaaaaacactttttgttgattatgcaagtggacatttggatagatttgaagatttcgttggaaacgggaatatcttcatatcaaatctagacagaagcattctcagaaacgtctttgtgatgtttgcattcaactcatagagttgaacattccgtttcagagagcagctttgaagcactctttttgtagtatgtgcaaggggatatttggagcgctctgaggcctaaggtgaaaaaggaaatatcttcccataaccactagacagaaacattctcagaaactcctttatgacgtatgcactcacctaacagagaagaaccttccttttgacagagcagttttgatacactctttttgtagaatctccaagtggatatttggatagctgtgaagatttcgttggaaacgggaatatcctcctataatatctagacagaagcattcgcagaaactgctctgtgatgtctgcattcaagtcacagagttgaacattgcctttcatagagccggtttgaaacgctctttttgtagtatatggaagtggatgtttcggacggttggaggcccatggtgataaagggaatatcttcccctacaagatagaaagaagcattctgtgaaacttgtttgtgatgtgtgtactcaactaacggagttgaacctttctttttacagagcagttttgaaacactctttttgtagaatctgcgaggggatatttggatagatttcaggatttcgttggaaacgggaatatcttcatagaaaatctcgacagaagcattctcagaaacttctttgtgatatgtgcattcaagtcacagagttgaatattccctttcacagagtaggtttgaaacactctttttgtagtatctggaagtggccatttggagcgccttgacacctacggtgaaaagggaaatatcttcccataaaaactagacagaagcaatctcagaatcttctttgggatatatgcacgcagctaacagagttgaacctttctattgccagagcagttttgaaacagtctttctgtggaatctgcaagtggatatttggatagcttggaggatttcgttggaaacgggattacgtataaaaagtagacagcagcatcctcagaaacttctttgtgatgtgtgcattcaagtcacagagttgaacattccctttcgtacagcagttttgaaacactctttctgtagtatctggaagtgaactttaggagagctttcaggtctatagtgagaaaggatatatcttcaaataaaaactagacagaagcattctcataaacttgtttgtgatgtgtcaactcagctaacagaggtggatctttcttttgatagagcagttctgaaaaacactttttgttgaatctgcaagtggacatttggatagatttgaagatttcgttggaaacgggaatatcttcatatcaaatctagacagaagcattctcagaaacgtctttgtgatgtttcaattaaactcatggagatgaacattccctttcagagagcagctttgaagcactctttttgtagtatgtgcaagtagatattttgagcgctctgaggcctacggggaaaaagcaaatatcttcccataaccactagacagaaacattctcagaaactcctttatgacgtatgcactcacctaacagagaagaaccttccttttgacagagaagttttgatacactctttttgtagaatctgcaagtggatatttggatagctgtgaagatttcgttggaaacgggaatatcttcctataaaatctagacagaagcattctcagaaactgctctgtgatgtctgcattcaagtcacagagttgaacattgcctttcctagagcaggtttgaaaccctctttttgtagtatagggaagtggacgtttcggacggtttgaggcccatggtgataaagggaatatcttcccctacaagctagaaagaagcattctgtgaaacttgtttgtgatgtgtgtactcaactaacagagttgaacctttctttttacagagcagttttgaaacactctttttgtagaatctgcgaggggatatttcgatagatttcaggatttcgttgtaaacgggaatatcttcatataaaatctcgacagaagcattctaagaagcttctttgtgatatgtgcattcaagtcacagagttgaatattccctttcacagagtaggtttgaaacactctttttgtagtatctggaagtggacatttggagcgccttgacgcctacggtgaaaacggaaatatcttctcataaaaagtagacagaagcaatctcagaatattctttgggatatatgcacgcagctaacagagttgaacctttctattgacagagcagttttgaaacagtctttctgtggaatctgcaagtggatatttggatagcttggaggatttcgttggaaacgggattacgtataaaaagtagacagcagcacctcagaaacttctttgtgatgtgtgcattcaagtcacagagttgaacattccctttcgtacagcagttttgaaacactctttctgtagtatctggaagtgaacattaggacagctttcagctctatggtgagaaaggaaatatcttcaaataaaaactagacagaagcattctcataaaattgtttgtgatgtgtgaactcagctaacagaggtggatatttcttttgatatagtagttttgaaaaacactttttgtagaatctgaaagtggatatttggatagatttgaagatttcgttggaaacgggaatatcttcgtataaaatctagacagaagcattctcagaaacgtctttgtgatgtttgcattcaactcatagagttgaacattccctttcagagagcagctttgaagcactctttttgtagcatgtgcaagtggacatttgtagcgccctgaggcctacggggaaaaagcaaatatcttcccataaccactagacagaaacattctcagaaactcctttatgacgtatgcactcacctaacagagaagaaccttccttttgacagagcagttttgatacactctttttgtagaatctgcaactggatatttggatagctgtgaagatttcgttggaaacgggaatatcttcctataaaatctagacagaagcattctcagaaactgctctgtgatgtctgcattcaagacacagagttcaacattgcctttcatagagcaggtttgaaacgctctttttgtagtatatggaagtggatgtttcggacggttggaggcccatggtgataaagggaatatcttcccctacaagctagaaagaagcattctgtgaaacttgtttgtgatgtgtgtactcaactaacagagttgaacctttcttttcacagagcagttttgaaacactctttttctagaatctgcgaggggatatttggatagatttcaggatttcattggaaacgggtatatcttcatataaaatctcgacagaagcattctcagaagcttctttgtgatatgtgcattcaagtcacagagttgaatattccctttcacagagtaggtttgagacactctttttgtagtatctggaagtggacatttggagcacattgacgcctacggtgaaaagggaaatatcttctcataaaaagtagacagaagcaatctcagaatcttctttgggatatatgcacgcagctaacagagtttaacctttctattgacagagcagttttgaaacagtccttctgtggaatctgcaagtggatatttggatagattggaggatttcgttggaaacgggattacgtataaaaagtagacagcagcatcctcagaaacttctttgtgatgtgtgcattcatgtcacagtgttgaacattccctttcgtacagccgttttgaaacactctttctgtagtatctctaagtgaacattaggacatctttcaggtctatggtgagaaaggaaatatcttcaaataaaaactagacagaagcattctcataaacttgtttgtgatgtgtgaactcagctaacagaggtgaatctttcttttgaaagagcagttctgaaaaacactttttgttgaatctgcaagtggacatttggatagatttgaagatttcgttggaaacgggaatatcttcatatcaaatctagacagaagcattctcggaaacgtctttgtcatgtttgcattcaactcatagagttgaacattccgtttcagagagcagctttgaagcactctttttgtagtatgtgcaagtggatatttggagcgctctgaggcctaagatgaaaaagcaaatatcttcccataaccactagacagaaacattctcagaaactcctttatgacgtatgtactcaactaacagagaagaaccttccttttgaaagagcagttttgatacactctttttgtagaatctgcaagtggatatttggatagctgtgaagatttcgttggaaacgggaatatcttcctataaaatctagacagaagcattctcagaaactgctctgtgatgtctgcattcaagtcacagagttgaacattgcctttcatagagcaggtttgaaaggctctttttgtactatatggaacaggacgtttcgaacggtttgaggaccatggtgataaagggaatatcttcccctacaagctagaaagaagcattctgtgaaacttgtttgtgatgtgtgtactcaactaacagtgttgaacctttctttttacagagcagttttgaaacactctttttgtagaatctgcgaggggaaatttggatagatttcaggatttcgttggaaacgggaatatcttcatacaaaatctcgacagaagcattctcagaaacttctttgtgatatgtgcattcaagtcacagagttgaatattccctttcacagagtaggtttgaaacactctttttgtagtatctggaagtggacatttggagcgccttgactgcctacggtgaaaagggaaatatcttcccataaaaactagacagaaacaatctcagaatcttctttgggatatatgtacgcagctaacagagttgaacctttctattgacagagcagttttgaaacagtctttctgtggaatctgcaagtggatatttggatagcttggaggatttcgttggaaacgggattacgtataaaaagtagacagcagcatcctcagaaacttctttgtgatgtgtgcattcaagtcacaaggttgaacattccctttcatacagcagttttgaaacgctctttctgtagtatctggaagtgaactttaggacagctttcaggtctatggtgagaaaggaaatatcttcaaataaaaactagacagaagcattctcataaacttgtttgtgatgtgtgaactcagctaacagaggtggatctttcttttgatagagcagttctgaaaaacactttttgatgaatctgcaagtggacatttggatagatttgaagatttctttggaaacgggaatatcttcatatcaaatctagacagaagcattctcagagacgtctttgtgatgtttgcattcaactcatagagttgaacattccctttcagagagcagctttgaagcactctttttgtagcatgtgcaagtggacatttggagcgccctgaggcctacggggaaaaagcaaatatcttcccataaccactagacagaaacattctcagaaactcctttatgacgtatgtactcaactaacagagaagaaccttccttttgacagagcagttttgatacactctttttgtagaatctgcaaatggatatttggatagctgtgaagatttcgttggaaacgggaatatcttcctataaaatctagacagaagcattctcagaaacagctctgtgatgtctgcattcaagtcacagagttgaacattgcctttcatagagcaggtttgaaacgctctttttgtagtatatgtaactggaggtttcggacggtttgaggcccatggtgataaagggaatatcttcccctacaagctagaaagaagcattctgtgaaacttgtttgtgatgtgtgtactcaactaacagagttgaaactttctttttacagagcagttttgaaacactctttttgtagaatctgcgaggggatatttggatagatttcaggattccgttggaaacgggaatatcttcatataaaatctcgacagaagcattctcagaaacttcattgtgatatctgcattcaagtcacagagttgaatattccctttcagagagtaggtttgaaacactctttttggagtatctggaagtggacatttggagtgccttgacacctacggtgaaaagggaaatatcttcccataaaaactagacagaagcaatctcagaatcttctttgggatatatgcacgcagctaacagagttgaacctttctattgacagagcagttttgaaacagtctttctgtggaatctgcaagtggatatttggatagcttggaggatttcgttagaaacgggattacgtataaaaagtagacagcagcatcctcagaaacttctttgtgatgtgtgcattcaagtcaaagagttgaacattccctttcatacagcagttttgaaacactctttctgtagtatctggaagtgaacattaggacagctttcagctctatggtgagaaaggaaatatcttcaaataaaaactagacagaagcattctcataaacttgtttgtgaggtgtgaactcagctaacagaggtggatctttcttttgatagagcagttctgaaaaacactttttgttgaatctgcaagtggacatttggatagatttgaagatttcgttggaaacgggaatatcttcatatcaaatctagacagaagcattctcagaaacgtctttgtgatgttggcattcaactcatagagttgaacattccgtttcagagagcagctttgaggcactctttttgtagtatgtgcaagtagatatttggagcgctctgaggcctacggtgaaaaagcaaatatcttcccataaccactagacagaaacattctcagaaactcctttatgacgtatgcactcacctaacagagaagaaccttccttttgacagagcagttttgatacactctttttgtagaatctgcaagtggatatttggatacctgtgaagatttcgttggaaacgggaatatcttcctataaaatgtagacagaagcattctcagaaactgctctgtgatgtctgcattcaagtcacagagttgaacattgcctttcatagagcaggtttgaaacgctctttttgtagtatatggaagtggatgtttcggacggttggaggcccatggtgataaagggaaaatcttctcctacaagctagaaagaagcattctgtgaaacttgtttgtgatgtgtgtactcaactaacagagttgaacctttctttttacaaagcagttttgaaacactctttttgtagaatctgcgaggggaaatttggatagatttcaggatttcgttggaaacgggaatatcttcatacaaaatctcgacagaaccattctcagaaacttccttgtgatatgtgcattcaagtcacagagttgaatattccctttcacagagtaggtttgaaacactctttttgtagtatctggaagtggacatttggagcgccttgacgcctacggtgaaaagggaaatatcttcccataaaaactagacagaagcaatctcagaatctgctttgggatatatgcacgcagctaacagagttgaacctttctattgacagagcagttttgaaacagtctttctgtggaatctgcaagtggatatttggatagcttggaggatttcgttggaaacgggattaagtataaaaagtagacagcagcatcctcagaaacttccttgtgatgtgtgcattcaagtcacagagttgaacattccctttcgtacagcagttttgaaacactctttctgtagtatctggaagtgaactttaggagagctttaaggtctatagtgagaaaggatatattttcaaataaaaactagacagaagcattctgataaacttgtttgtgaagtgtgatctcagctaacagaggtggatctttcttttgatagagcagttctgaaaaacactttgttgaatctgcaagtggacatttggatagatttgaagatttcattggaaacgggaatatcttcatatcaaatctagacagaagcattctcagaaacgtctttgtgatgtttgcattcaactcatagagttgaacattccgtttcagagagcagctttgaagcactctttttgtagtacgtgcaagtggatatttggagtcctctgaggcctaaggtgaaaaagcaaatatcttcccacaaccactagacagaaacattctcagaaactcctttatgacgtatgcactcacctaacagagaagaaccttcctttggacagagcagttttgatacactctttttgtagaatctgcaattggatatttggatagctgtgaagatttcgttggaaacgggaatatcttcctataaaatctagacagaagcattctcagtaactgctctgtgatgtctgcattcaagtcacagagttgaacattgcctttcatagagcaggtttgaaacactccttttttagtatatggaagtggacgtttcggacggtttgaggcccatggtgataaagggaatatcttcccctacaagctagaaagaagcattctgtgaaacttgtttgtgatgtgtgtactcaactaacagagttgaacctttctttttacagagcagttttgaaacactctttttgtacaatctgtgagggggtatttggatagatttcaggatttcgttggaaacgggaatatcttcatataaaatctcaacagaagcattctcagaaacttctttgtgatatgtgcattcaagtcacagagttgaatattccctttcacagagtaggtttgaaacactctttttgtagtatctggaagtggacatttggagcgcctcgacgcctacggtgaaaagggaaatatcttctcataaaaagtagacagaagcaatctcagaatcttctttgggatatatgcacgcagctaacagagttgaacctttctattgacagagcagttttgaaacagtctttctgtggaatatgcaagtggatatttggatagcttggaggatttcgttggaaacgggattacgcataaaaagtagacagcagcatcctcagtaaacttctttgtgatgtgtgctttcaagtcacagtgttgaacattccctttcgtacagcagttttgaaacactctttctgtagtatctggaagtgaacattaggacagctttcaggtctatggtgagaaaggaaatatcttcaaataaaaactagacagaagcattctcataaacttgtttctgatgtgtgaactcagctaacagaggtggatctttcttttgatagagcagttctgaaaaacactttttgttgaatctgcaagtggacatttggatagatttgaagatttctttggaaacgggaatatcttcatatcaaatctagacagaagcattctcagaaacgtctttgtgatgtttgcattcaactcatagagttgaaaattccctttcagagagcagctttgaagcactctttttgtagtatgtgcaagtggatatttggagcgctctgaggcctacggtgaaaaagcaaatatcttcccataaccactagacagaaacattctcagaaactcctttatgacgtgtgcactcacctaacagagaagaaccttcctttttacagagcagttttgatacactctttttgtagaatctgcaagtggatatttggatagctgtgaagatttcgttggaaacggtaatatcttcctataaaatctagacagaagcattctcagaaacgtctttccgatgtttgcattcaactcatagagttgaacattccctttcagagagcagctttgaagcactctttttgtaccatgtgcaagtggacatttggagggccctgaggcctacggggaaaaagcaaatatcttcccataaccactagacagaaacattctcagaaactcctttatgacgtatgcactcacctaacagagaagaaccttcctttttacagagcagttttgaaacactctttttgtagaatctgcgaggggatatttggatagatttcaggatttcgttggaaacgggaatatcttcatataaaatctcgacagaagcattctcagaaacttctttgtgatatgtgcattcaagtcacagagttgaatattccctttcacagagtaggtttgaaacactctttttgtagtatctggaagtggacatttggagcgccttgacacctacagtgaaaagggaaatatcttcccataaaaactagacagaagcaatctcagaatcttctttgggatatatgtacgcagctaacagagttgaacctttctattgacagagcagttttgaaacagtctttctgtggaatctgcaagtggatatttggatagcttggaggatttctttggaaacgggattacgtataaaaagtagacagcagcatcctcagaaacttctttgtgatgtgtgcattcaagtcacagagttgaacattccctttcgtacagcagttttgaaacactctttctgtagtatctggaagtgaacattaagacagctttcaggtctatggtgagaaaggaaatatcttcaaataaaaactagacagaagcattctcataaacttgtttgtgatgtgtgaactcagctaacagaggtggatctttcttttgatagagcagttctgaaaaaccctttttgttgaatctgcaagtggacatttggatagatttgaagatttcgttggaaacgggaatatcttcatatcaaatctagacagaagcattctcagaaacgtctttgtgatgtttgcattcaactcatagagttgaacattccctttcagagaccagctttgaagcactctttttgtagtatgtgcaagtggatatttggagcgctctgaggcctacggtgaaaaagcaaatatcttcccataaccactagacagaaacattctcagaaactcctttatgacgtatgcactcacctaacagagaagaaccttccttttgacagagcagttttgatacactctttttgtagaatctgcaagtggatatttggatacctgtgaagatttcgttggaaacgggaatatcttcctataacatactagacagaagcattctcagcaaactgctctgtgatgtctgcattcaagtcacagagttgaacattgcctttcatagagcaggtttgaaacgctctttttgtagtatatggaagtggacttttcggacggtttgaggcccatggtgataaagggaatatcttcccctacaagctagaaagaagcattctgtgaaacttgtttgtgatgtgtgtactcaactaacagagttgaacctttctttttacagagcagttttgaaacactctttttgtagaatctgcgaggggaaatttggatagatttcaggatttcgttggaaacgggaatatcttcatacaaaatctcgacagaagcattctcagaaactactttgtgatatctgcattcaagtcacagagttgaatattccctttcacagagtaggtttgaaacactctttttgtagtatctggaagtggacatttggagcgccttgacacctacggtgaaaagggaaatatcttcccataaaaactagacagaagcaatctcagaatcttctttgggatatatgcacgcagctaacagagttgaacctttctattgagagagcacttttgaaagagtctttctgtggaatctgcaagtggatatttggatagcttggaggatttcgttggaaacgggattacgtataaaaagtagacagcagcatcctcagaaacatccttgtgatgtgtgcattcaagtcacagagttgaacattccctttcgtacagcagttttgaaacactctttctgtagtatctggaagtgaactttaggagagctttcaggtctatagtgagaaaggatatatcttcaaataaaagctagacagaagcattctcataaacttgtttgtgatgtgtgaactcagctaacagaggtggatctttcttttgatagagcagttctaaaaaacactttttgttgaatctgcaagtggacatttggatagatttgaagatttcgttggaaacgggaatatcttcatatcaaatctagacagaagcattctcagaaacgtctttgcgatgtttgcattcaactcatagagttgaacattccgtttcagagagcagctttgaggcactctttttgtagtatgtgcaagtggatatttggagcgctctgaggcctacagtgaaaaagcaaatatcttcccataaccactagacagaaacattctcagaaactcctttatgacgtatgtactcaactaacagagaagaaccttctttttgacagagcagttttgatacactctttttgtagaatctgcaagtgcatatttggatagctgtgaagatttcgttggaaacgggaatatcttcctataaaatctagacagaagcattctcagaaactgctctgtgatgtctgcattcaagtcacagagttgaacattgcctttcatagagcaggtttgaaatgctctttttgtagtatatggaagtggacttttcggacggtttgaggcccatggtgataaaggggaatatcttcccctacaagctagaaagaagcattctgtgaaacttgtttgtgatgtgtgtactcaactaacagagttgaacctttcattttacagagcagtttagaaacactctttttgtagaatctgcgaggggatatttggatagatttcaggatttcgttggaaaggggaatatcttcatttaaaatctcgacagaagcattctcagaagcttctttgtgatatgtgcattcaagtcacagagttgaatattccctttcacagagtaggtttgaaacacactttttatagtatctggaagtggacatttggagcgccttgatgcctacggtgaaaagggaaatatcttcccataaaaactagacagataagcaatctcagaatcttctttgggatatatgcacgcagctaacagagttgaacctttctattgacagagcagttttgaaacagtctttctgtggaatctgcaagtggatatttggatagattggaggatttcgttggaaacgggattacgtataaaaagtagacagcagcatcctcagaaacttctttgtgatgtgtgcattcaagtcagagtgttgaacattccctttcgtacagcagttttgaaacactctttctgtagtatctggaagtgaacattaagacagctttcaggtctatggtgagaaaggaaatatcttcaaataaaaactagacagaagcattctcataaacttgtttgtgatgtgtgaactcagctaacagaagtggatctttcttttgatagagcagttctgaaaaacactttttgttgaatctgcaagtggacatttgaaaagatttgaagatttcgttggaaacgggaatatcttcatatcaaatctagacagaagcattctcagaaacgtctttgtgatgtttgcattcaactcatagagttgaatattccctttcagagagcagctgtgaagcactctttttgtagtatgtgcaagtggatatttggagcgctctgaggcctacggtgaaaaagcaaatatcttcccataaccactagacagaaacattctcagaaactcctttatgacgtatgcactcacctaacagagaagaaccgtccttttgacagagcagttttgatacactctttttgtagaatctgcaagtggatatttggatagctgtgaagatttcgttggaaacgggaatatcttcctataaaatctagacagaagcattctcagaaactgctctgtgatgtctgcattcaagtcacagagttgaacattgcctttcatacagcaggtttgaaatgctctttttgtagtatatggaagtggacgtttcagacggtttgaggcccatggtgataaagggaatatcttcccctacaagctagaaagaagcattgtgtgaaacttatttgtgatgtgtgtactcaactaacagagttgaacctttctttttacagagcagttttgaaacactctttttgtagaatctgcgaggggatatttggatacatttcaggatttcgttggaaacgggaatatcttcatataaaatctcgacagaagcattctcagaagcttctttgtgatatgtgcattcaagtcacagagttgaatattccctttcacagagtaggtttgaaacacactttttgtagtatctggaagtggacatttggagcgccttgatgcctacggtgaaaagggaaatatcttctcataaaaagtagacagaagcaatctcagtaatcttctttgggatatatgcacgcagctaacagtagttgaacctttctattgacagagcagttttgaaacagtctttctgaggaatctgcaagtggatatttggatagcttggaggatttcgttggaaacgggattacgtataaaaagtagacagcagcatcctcagaaacttctttgtgatgtgtgcattcaagtcacagagttgaacattccctttcgtacggcagttttgaaacactctttctgtagtatctggaagtgaacattaggacagctttcaggtctatggtgagaaaggaaatatcttcaaataaaaactagacagaagcattctcataaacttgtttgtgatgtgtgaactcagctaacagaggtggatctttcttttgatagagcagttctgaaaaacactttttgttgaatctgcaagtggacatttggatagatttgaagattttgttggaaacgggaatatcttcatatcaaatctagacagaagcattctcagaaacgtctttgtgatgtttgcattcaactcatagagttgaacattccgtttcagagagcagctttgaggcactctttttgtagtatgtgcaagtggatatttggagcgctctgaggcctacggtgaaaaagcaaatatcttcccataaccactagagagaaacattctcagaaactcctttatgacgtatgcactcacctaacagaaaagaaccttccttttgacagagcagttttgatacactctttttgtagaatctgcaagtggatatttggatagctgtgaagatttcgttggaaacgggaatatattcgtataaaatctagacagaagcattctcagaaactgctctgtgatgtctgcattcaagtcacagagttgaacattgcctttcctagagcaggtttgaaacgctctttttgtagtatatggaagtggatgtttcgtacggttggaggcccatggtgataaagggaatatcttcccctacaagctagaaagaagcattctgtgaaacttgtttgagatgtgtgtactcaactaacagtgttgaacctttctttatacagagcagttttgaaacactctttttgtagaatctgcgaggggatatttggatagatttcaggatttcgttggaaacgggaatatcttcatataaaatctcgacagaagcattctctgaaacttctttgtgatatgtgcattcaagtcacagagttgaatattccctttcacagagtaggtttgaaacactctttttgtagtatctggaagtggacatttggagcgccttgacgcctacggtgaacagggaaatatcttctcataaaaagtagacagaagcaatctcagaatcttctttgggatatatgcacgcagctaacatagttgaacctttctattgacagagcagttttgaaacagtctttctgtggaatctgcaagtggatatttggatagcttggaggatttcgttggaaacgggattacgtataaaaagtagacagcagcatcctcagaaacttctttgtgatgtgtgcattcaagtcacagagttgaacataccctttcgtacagcagttttgaaacactctttctgtagcatctggaagtgaacattaggacagctttcaggtctatggtgagaaaggaaatatcttcaaataaaaactagacagaagcattctcataaacttgtttgtgatgtgtgaactcagctaagagacgtggatctttcttttgatagagcagttctgaaaaacactttttgttgaatctgcaagtggacatttggacagatttgaagatttctttggaaacgggaatatcttcatatcaaatctagacagaagcattctcagaaacgtctttgtgatgtttgcattcaactcatagagttgaacattccgtttcagagagcagctttgaggcactctttttgtagtatgtgcaagtggatatttggagcgctctgaggccctcggtgaaaaagcaaatatcttcccataaccactagacagaaacattctcacaaactcctttatgacgtatgtactcaactaacagagaagaaccttccttttgacagagcagttttgatacactctttttgtagaatctgcaagtggatatttggatagctgtgaagatttcgttggaaacgggaataccttcctataaaatctagacagaagcattctcagaaactgctctgtgatgtctgcattcaagtcacagagttgaacattgactttcatagagcaggttagaaacgctctttttgtactatatggaagaggacgtttcggacggtttgaggaccatggtgataaagggaatatcttcccctacaagctagaaagaagcactctgtgaaacttgtttgtgatgtgtgtattcaactaacagagttgaacctttctttttacagagcagttttgaaacactctttttgtagaatctgcgaggggatatttggatagatttcaggatttcgttggaaacgggaatatcttcatataaaatctcgacagaagcattctcagaaacttctttgtgatatctgccttcaagtcacagagttgaatattccctttcacagagtaggtttgaaacactctttttgtagtatctggaagtggacatttggagtgccttgacgcctacggtgaaaagggaaatatcttcccataaaaactagacagaagcaatctcagaatcttctttgggatatatgcacgcagctaacagagttgaacctttctattgacagagcagttttgaaacagtctttctgtggaatctgcaagtggatatttggatagcttggaggatttcgttggaaacgggattacgtataaaaagtaaacagcagcatcctcagaaacttctttgtgatgtgtgcattcaagtcacagagttgaacattccctttcgtacagcaattttgaaacactctttctgtagtatctggaagtgaacattaggacagctttcagctctatggtgagaaaggaaatatcttcaaataaaaactagacagaagcattctcataaacttgtttatgatgtgtgaactcagctaacagaggtggatctttcttttgatagagcagttctgaaaaacactttttgttgaatctgcaagtggacatttggatagatttgaagatttcgttggaaacgggaatatcttcatatcaaatctagacagaagcattctcagaaacgtctttgtgatgtttgcattcaactcatagagttgaacattccgtttcagagagcagctttgaggcactctttttgtagtatgtgcaagtggatatttggtgcgctgtgaggccaacggtgaaaaagcaaatatcttcccataaccactagacagaaacattctcagaaactcctttatgacgtatgcactcacctaacagagaagaaccttccttttgacagagaagttttgatacactctttttgtagaatctgcaagtggatatttggatacctgtgaagatttcgttggaaacgggaatatcttcctataaaatctagacagaagcattctcagaaactgctctgtgatgtctgcattcaagtcacagagttgaacattgcctttcatagagcaggtttgaaacactctttttgtagtatatggaagtggacgtttcggacggtttgaggcccatggtgataaagggaatatcttcccctacaagctagaaagaagcattgtgtgaaacttgtttgtgatgtgtgtactcaactaacagagttgaacctttctttttacagagcagttttgaaacactctttttgtagaatctgcgaggggatatttggatagatttcaggatttcgatggaaacgggaatatcttcatataaaatctcgacagaagcattctcagaaacttctttgtgatatctgcattcaagtcacagagttgaatattccctttcacagagtaggtttgaaacactctttttgtagtatctggaagtggacatttggagcaccttgacacctacggtgaaaagggaaatatcttcccgataaaaactagacagaagcaatctcagaatcttctttgggatatatgcacgcagctaacagcagttgaacctttctattgacagagcagttttgaaacagtctttctgtggaatctgcaagtggatatttggatagcttggaggatttctttggaaacgggactacgtgtaaaaagtagacagcagcatcctcagaaacttctttgtgatgtgtgcattcaagtcacagagttgaatattccctttcgtacagcagttttgaaaaactctttctgtagtatctggaagtgaacattaggacagcattcaggtctatggtgagaaaggaaatatcttcaaataaaaactacacagaggcattctcataaacttgtttgtgatgtgtgaactcagctaacagacgtggatctttcttttgatacagcagttttgaaaaacactttttgttgaatctgaaagtggacatttggatagatttgaagatttccttggaaacgggaatatcttcatatcaaatctagacagaagcattctcagagacgtctttgtaatgtttgcattcaactcatagagttgaacattccctttcagagagcagctttgaagcactctttttgtagcatgtgcaagtggacatttggagcgccctgaggcctacggtgaaaaagcaaatatcttcccataaccactagacagacaaacattctcagaaactcctttatgacgtatgcactcacctaacagaaaagaaccttccttttgacagagcagttttgatacactctttttgtagaatctgcaagtggatatttggatagctgtgaagatttcgttggaaacgggaatatcttcctataaaatctagacagaaagcattctcagaaactgctctgtgatgtctgcattcaagtcacagagttgaacattgcctttcatagagcaggtttgaaacgctctttttgtagtatatggaagtagacgtttcggacggcttgaggcccatggtgataaagggaatatcttaccctacaagctagaaagaaacattctcagaaactcctttatgaagtatgcactcacctaacagagaagaaccttccttttgacagagcagttttgatacactctttttgtagaatctgcaagtggatatttggatagctgtgaagatttcattggaaacgggaatatcttcctataaaatctagacagaagcattctcagaaacttctttgtgatatctgcattcaagtcacagagttgaatattccctttcacagagtaggtttgaaacactctttttgtagtatctggaagtggacatttggagcgccttgatgcctacggtgaaaagggaaatatcttcccataaaaactagacagaagcaatctcagaatcttctttgggatatatgcacgcagctaacagagttgaacctttctattgacagagcagttttgaaacagtctttctgtggaatctgcaagtggatatttggatagcttggaggattttgttggaaacgggattacgtataaaaagtagacagcagcatcctccgaaactactttgtgatgtgtgcattcaagtcacagagttgaacattccctttcgtacagcagttttgaaacactctttctgtagtatctggaagtgaacattaggacagctttcagctctatggtgagaaaggaaatatcttcaaataaaaactagacagaagcattctcataaacctttttgtgatgtgtgaactcagctaacagaggtggatctttcttttgatagagcagttctgaaaaacactttttgttgaatatgcaagtggatatttggatagatttgaagatttcgttggaaacgggaatatcttcatatcaaatctagacagaagcattctcagaaacgtctttgtgatgtttgcattcaactcatagagttgaacattccgtttcagagagcagctttgaggcactctttttgtagtatgtgcaagtgggtatttggagcgctctgaggcctacggtgaaaaagcaaatatcttcccataaccactagacagatacattctcagaaactcctttatgacgtatgcactcacctaacagagaagaaccttccttttgacagagcagttttgatacactctttttgtagaatctccaagtggatatttggatagctgtgaagatttcgttggaaacgggaatatcttcttatgaaatctagacagaagcattctcagaaactgctctgtgatgtctgcattcaagtcacagagttgaacattgcctttcatatagcaggtttgaaacgctctttttgtagtatatggaagtggacttttcggacggtttgaggcccatggtgataaagggaatatcttcccctacaagctagaaagaagcattctgtgaaacttgtttgtgatgtgtgtactcaactaacagagttgaacctttcttttcacagagcagttttgaaacactctttttgtagaatctgcgaggggaaatttggatagatttcaggatttcgttggaaacgggaatatcttcatacaaaatctcgacagaagcattctcagaaacttctttgtgatatgtgcattcaagtcacagagttgaatattccctttcacagagtaggtttgaaacactctttttgtactatctggaagtggacatttggagcgccttgacgcctacggtgaaaagggaaatatcttcccataaaaactagacagaagcaatctcagaatcttctttgggatatatgcacgcagctaatagagttgaacttttctattgacagagcagatttcaaacagtgtttctgtggaatctgcaagtggatatttggatagcctggaggatttcgttggaaacgggattacgtataaaaagtagacagcagcatcctcagaaacttctttgtgatgtgtgcattcaagtcacagagttgaacattccctttcgtacaacagttttgaaacactctttctgtagtatctggaagtgaacattaggacagctttcagctctatgatgagaaaggaaatatcttcaaataaaaactagacagaagcattctcataaacttgtttgtgatgtgtgaactcagctaacagaggtggatctttcttttgatagagcagttctgaaaaacactttttgttgaatctgcaagtggacatttggatagatttgaagatttcgttggaaacgggaatatcgtcatatcaaatctagacagaagcattctcagaaacgtctttgcgatgtttgcattcaactcatagagttgaacattccgtttctgagagcagctttgaggcactctttttgtagtatgtgcaagtggatatttggagcgctctgaggcctacggtgaaaaagcaaatatcttcccataaccactagacagaaacattctcagaaactcctttatgacgtatgcactcacctaagagagaagaaccttccttttgacagagcagttttgatacactctttttgtagaatctgcaagtggatatttggatagctgtgaagatttcgttggaaacgggaatatcttcttataaaatctagacagaagcattctcagaaactgctatgtgatgtctgcattcaagtcacagagttgaacattgcctttcctagagcaggtttgaaacgctctttttttagtatatggaagtggacgtttcggacggtttgaggcccatggtgataaagggaatatcttcccctacaagctagaaagaagcattgtgtgaaaattgtttgtgatgtgtgtactcaactaacagagttgaacctttctttttacagagcagttttgaaacactctttttgtagaatctgcgaggggatatttggatacatttcaggatttcgttggaaacgggaatatcttcatataaaatctcgacagaagcattctcagaaacttctttgtgatatgtgcattcaagtcacagagttgaatattccctttcacagagtaggtttgaaacactctttttgtagtatctggaagtggacatttggagcgccttgacgcctacggtgaaaagggaaatatcttcccatacaaactagacagaagcaatctcagaatcttctttgggatatatgcacgcagctaacggagttgaacctttctattgacagagcagttttgaaacagtctttctgtggaatctgcaagtggatatttggatagcttggaggatttcgttggaaacgggattacgtataaaaagtagacagcagcatcctcagaaacttctttgtgatgtgtgcattcaagtcacagagttgaacattccctttcgtacagcagttttgaaacactctttctgtagtaactggaagtaaacattaggacagctttcaggtctatggtgagaaaggaaatatcttcaaataaaaactagacagaagcattctcataaacttgtttgtgatgtgtgaactcatctaacagaggtggatctttcttttgatagagcagttctgaaaaacactttttgttgaatctgcaagtggacatttggatagatttgaagatttcgttggtaacgggaatatcttcatatcaaatctagacagaagcattctcagaaacgtctttgtgatgtttgaattcaactcatagagttgaacattccgtttcagagagcagctttgaagcactctttttgtagtatgtgcaaggggatatttggagcgctctgaggcctacggtgaaaaagcaaatatcttcccataaccactagacagaaacattctcagaaactcctttatgacgtatgtactcaactaacagagaagaaccttccttttgacagagcagttttgatacactctttttgtagaatctgcaagtggatatttggatagctgtgaagatttcgttggaaacgggaatatcttcctataaaatctagacggaagcattctcagaaactgctctgtgatgtctgcattcaagtcacagagttgaacattgcctttcatagagtaggtttgaaacgctctttttgtagtatatggaagtggacgtttcggacggtttgaggcccatggtgataaagggaatatcttcccctacaagctagaaagaagcattctgtgaaacttgtttgtgatgtgtgtactcaactaacagagttgaacctttctttttacagagcagttttgaaacactctttctgtagaatctgcgaggggatatttggatacatttcaggatttcgttggaaacgggaatatcttcatagaaaatctcgacagaagcattctcagaaacttctttgtgatatctgcattcaagtcacagagttgaatattccctttcacagagtaggtttgaaacactctttttgtagtatctggaagtggacatttggagcgccttgacacctacggtgaaaagggaaatattttcccataaaaactagacagaagcaatctcagaatcttctttgggatatatgcacgcagctaacagagttgaacctttctattgacagagcagttttgaaacagtctttctgtggaatctgcaagtggatattttgatagattggaggatttcgttggaaacgggattacgtataaaaagtagacagcagcatcctcagaaacttctttgtgatgtgtgcattcaagtcacagagttgaacattccctttcatacagcagttttgaaacactctttctgtagtatctggaagtgaacattaggacagctttcagctctatggtgagaaaggaaatatcttcaaataaaaactagacagaagcattctcatcaacttgtttgtgatgtgtgaactcagctaacagaggtggatctttcttttgatagagcagttttgaaaaacactttttgttgaatctgcaagtggacatttggatagatatgaagatttcgttggaaacgggaatatcttcatatcaaatctagacagaagcattctcagaaacgtctttgtgatgtttgcattcaactcatagagttgaacattccctttcagagagcagctttgaagctctctttttgtagtatgtgcaagggtatatttggagctctctgaggcctaaggtgaaaaagcaaatatcttcccataaccactagacagaaacattctcagaaactcctttatgacgtatgcactcacctaacagaaaagaaccttccttttgacagagcagttttgatacactctttttgtagaatctgcaagtggatatttggatagctgtgaagatttcattggaaacgggaatatcttcctataaaatctagacagaagcattctcagaaactgctctgtgatgtctgcattcaagtcacagagttgaacattgcctttcatagagcaggtttgaaacgctctttttgtagtatatggaagtggatgtttcggacggttggaggcccatggtgataaagggaatatcttcccctacaagtctagaaagaagcattgtgtgaaacttgtttgtgatgtgtgtactcaactaacagatttgaacctttctttttacagagcagttttgaaacactctttttgtagaatctgcgaggggatatttggatagatttcaggatttcgttggaaacgggaatatcttcatataaaatctcgacagaagcattctcagaaaacttctttgtgatatgtgcattcaagtcacagagttgaatattccctttcacagagtaggtttgaaacactctttttgtagtatctggaagtggacatttggagcgccttgacacctacggtgaaaagggaaatatcttcccataaaaactagacagaagcaatctcagaatcttctttgggatatatgcacgcagctaacagagttgaatctttctgttgacagagcagatttgaaacagtctttctgtggaatctgcaagtggatatttggatagattggaggatttcattggaaacgggattacgtataaaaagtagacagcagaatcctcagaaacttctttgtgatgtgtgcattcaagtcacagggttgaacattccctttcgtacagcagttttgaaacactctttctgtagtatctggaagtgaacattaggacagctttcaggtctatggtgagaaaggaaatatcttcaaataaaaactagacagaagcattctcataaacttgtttgtgatgtgtggactcagctaacagaggcggatctttcttttgatagagcagttcgggaaaacactttttgttgaatctgcaagtggacatttggatagatttgaagatttcgttggaaacgggaatatcttcatatcaaatctagacagaagcattctcagaaacgtctttgtgatgtttgcattcaactcatagagttgaacattccctttcagagagcagctttgaagcactctttttgtagcatgtgcaagtggacatttggagcgccctgaggcctacggtgaaaaagcaaatatcttcccataaccactagacagaaacattctcagaaactcctttatgacgtatgcactcacctaacagagaagaacctaccttttgacagagcagttttgatacactctttttgtagaatctgcgaggggatatttggagagatttcaggatttcgttggaaacgggaatatcttcatataaaatctcgacagaagcattctcagaaactgctctgtgatgtctgcattcaagtcacagagttgaacattgcctttcatagagtaggtttgaaacgcttttttgtagtatatggaagtggatgtttcggacggttggaggcccatggtgataaagggaatatcttcccctacaagctagaaagaagcattctgtgaaacttgtttgtgatgtgtgtactcaactaacagagttgatcctttctttttacagagcagttttgaaacactctttttgtagaatctgcgaggggatatttggatagatttcaggatttcgttggaaacgggaatatcttcatataaaatctcgacagaagcattctcagaaacttctttgtgatatgtgcattcaagtcacagagttgaatattccctttcacagagtaggtttgaaacactctttttgtcgtatctagaagtggacatttggagtgcattgacgcctacggtgaaaagggaaatatcttcccataaaaactagacagaagcaatctcagaatcttctttgggatatatgcacgcagctaacagagttgaacctttctattgacagagcagttttgaaacagtctttctgtggaatctgcaagtggatatttgatagcttggaggatttcgttggaaacgggattacgtataaaaagtagacagcagcatcctcagaaactactttgtgatgtgtgcattcaagtcacagagttgaaaattccctttcgtacagcagttttgaaacactctttctgtagtatctggaagtgaacattaggacagctttcaggtctatagtgagaaaggatatatcttcaaataaaaactagacagaagcattctcataaacttgttcgtaatgtgtgaactcagctaacacacgtggatctttcttttgatagagcagttctgaaaaacactttttgttgaatctgcaagtggacatttggatagatttgaagatttcgttggaaacgggaatatccttcatatcaaatctagacagaaagcattctcagaaacgtctttgtgatgtttgcattcaactcatagagttgaacattccgtttcagagaccagctttgaagcactctttttgtagtatgtgcaagtggatatttggagcgctctgaggcctacggtgtaaaagcaaatatcttcccataaccactagacagaaacattctcagaaactcctttatgacgtatgtactcaactaacagagaagaaccttccttttgacagagcagttttgatacactctttttgtggaatctgcaagtggatatttggatagctgtgaagatttcgttggaaacgggaatatcttcctataaaatctagacagaagcattctcagaaactgctctgtgatgtctgcattcaagtcacagagttgaacattgcctttcatagagcaggtttgaaacgctctttttgtagtatatggaagtagtcgtttcggacggtttgaggcccatggtgataaagggaatatcttcccctacaagctagaaagaagcattctgtgaaacttgtttgtgatgtgtgtactcaactaacagagttgaacctttctttttacagagcagttttgaaacactctttttgtagaatctgcgaggggatatttggatagattttaggatttcgttggaaacgggaatatcttcatataaaatctcgacagaagcattctcagaaacttctttgtgatatctgcattcaagtcacagagttgaatattccctttcacagagtaggtttgaaacactctttgtggtatctggaagtggacatttggagcgccttgacgcctacggtgaaaagggaaatatcttcccataaaaactagacagaagtaatctcagaatcttctttgggatatatgcacgcagctaacagagttgaacctttctattgacagagcagttttgaaacagtctttctgtggaatctgcaagtggatatttggatagcttggaggatttcgttggaaacgggattacgtataaaaagtggacagcagcatcctcagaaacttctttgtgatgtgtgcattcaagtcacaggagttgaacattccctttcgtacagcagttttgaaacactctttctgtagtatctggaagtgaacattacgacagctttcaggtctatggtgagaaaggaaatatcttcaaataaaaactagacagaagcattctcataaacctgtttgtgatgtgggaactcagctaacagaggtggatctttcttttgatagagcagttctgaaaaacactttttgttgaatctgcaagtggacatttggatagatttgaagatttcgttggaaacgggaatatcttcatatcaaatctagacagaagcattctcagaaaacgtctttgcgatgtttgcattcaactcatagagttgaacattccgtttcagagagcagctttgaggcactctttttgtagtatgtgcaagtggatatttggagcgctctgaggcctacggtgaaaaagcaaatatcttcccataaccacaagacagaaacattctcagaaactcctttatgacgtatgcactcacctaacagaaaagaaccttccttttgacagagcagttttgatacactctttttgtagaatctgcaagtggatattaggatagctgtgaagatttcgttggaaacgggaatatcttcctataaaatctagacagaagcattctcagaagctgctctgtgatgtctgcattcaagtcacagagttgaacattgcctttcatggagcaggtttgaaacgctctttttgtactatatggaagtggacgtttcggacggtttgaggcccatggtgataaagggaatatcttcccctacaagctagaaagaagcattctgtgaaacttgtttgtgatgtgtgtactcaactaacagagttgaacctttctttttacagagcagttttgaaacactcgttttgtagaatctgcgaggggatatttggatagatttcaggatttcgttggaaacgggaatatcttcatataaaatctcgacagaagcattctcagaaacttctttgtgatatctgcattcaagtcacagagttgaatattccctttcacagagtaggattggaacactcttttgtagtatctggaagtggacatttggagcgccttgacgcctacggtgaaaacggaaatatcttcccataaaaactagacagaagcaatctcagaatcttctttgggatatatgcacgcagttaacagagttgaacctttctattgacagagcagttttgaaacagtctttctgtggaatctccaattggatatttggatagcttggaggatttcgttggaaacgggattacgtataaaaagtagacagcagcatcctcagaaacttctttgggatgtgtgcattcaagtcacagagttgaacattccctttcgtacagcagttttgaaacactctttctgtagtatctggaagtgaacattaggacagctttccggtctatggtgagaaaggaaatatcttcaaataaaaactagacagaagcattctcataagcttgtttgtgatgtgtgaactcagctaacagaggtggatctttcttttgatagagcagttctgaaaaacactttttgttgaatctgcaagtggacatttggatagatttgaagatttcgttggaaacgggaatatcttcatatcaaatctagacagaagcattctcagaaacgtctttgtcatgtttgcattcaactcatagagttgaacattccgtttcagagaggaggtttgaagcactctttttgtagtatgtgcaagtggatatttggagcgctctgaggcctacggtgaaaaagcaaatatcttcccataaccactagacagaaacattctcagaaactccttaatgacgtatgcactcacctaacagagaagaaccttccttttgacagagcagttttgatacactctttttgtagaatctgcaagtggatatttggatagctgtgaagatttcgttggaaacgggaatatcttcctataaaatctagacagaagcattctcagaaactgctctgtgatgtctgcattcaagtcacagagttgaacattgcctttcatagagcaggtttcaaacactctttttttagtatatggaagtggacgattcggacggtttgaggaccatggtgataaaggaaatatcttcccctacaagctagaaagaagcattctgtgaaacttgtttgtgatgtgtgtactcaactaacagtagttgaacctttctttttacagagcagttttgaaacactctttttgtagaatctgcgaggggatatttggatagatttcaggatttcgttggaaacgggaatatctttatataaaatctcgacagaagcattctcagaaacttctttgtgatatctgcattcaagtcacagagttgaatattccctttcacagagtaggtttgaaacactctttttgtagtatctggaagtggacatttggagcgccttgactgctacggagaaaagggaaatatcttccctaaaaaactagacagaagcaatctcagaatcttctttgggatatatgcacgcagctaacagagttgaacctttctattgacagagcagttttgaaacagtctttctgtggaatctgcaagtggatatttggatagcttggaggatttcgttggaaaagggattacgtataaaaagtagacagcagcatcctcagaaacttctttgtgatgtgtgcattcaagtcacagagttgaacatttcctttcgtacagcagttttgaaacactctttctgtagtatctggaagtgaacattaggacagctttcaggtctatggtgagaaaggaaatatcttcaaataaaaactatacagaagcattttcataaacttgtttgtgatgtgtgaactcagctaacagaggtggatctttcttttgatagagcagttctgaaaaacacgttttgttgaatctgcaagtggacatttggatagatttgaagatttcgttggaaacgggaatatcttcatatcaaatctagacagaagcattctcagaaacgtctttgtgatgtttgcattcaactcatagagttgaacattccctttcagagagcagctttgaagcactcattttgtagtatgtgcaagtggacattaggagcactttgaggcctacggtgaaaaagcaaatatcttcccataaccactagacagaaaccttctcagaaacttctttatgacgtatgtactcaactaacagagaagaaccttccttttgacagagcagttttgatacactcttcttgtagaatctgcaagtagatatttggatatctgtgaagaattcgttggaaaagggaatatctttctataaaatctaaacaaaagcattctcagaaactgctctgtgatgtctgcattcaagtcacagagttgaacattgcctttcatagagcaggtttgaatcgctctttttgtagtatatggaagtggacgtttcagacggtttgaggcccatggtgataaagggaatatcttcccctacaagctagaaagaagcattctgtgaaacttgtttgtgatgtgtgtactcaactaacagagttgaacctttctttttacagagcagttttggaacactctttttgtagaatctgcgaggggatatttagatagatttcaggatttcgttggaaacgggaatatcttcatataaaatctcgacagaagcattctcagaaacttctttgtgatatgtgcattcaagtcacagagttgaatattccctttcacaggagtaggtttgaaacactctttttgtagtatctggaagtggacatttggagcgccttgacgcctacggtgaaaagggaaatatcttcccataaaaactagacagaagcaatctcagaatcttctttgggatatatgcacgcagctaacagagttgaacctttctattgacagagcagttttgaaacagtctttctgtggaatctgcaagtggatatttagatagcttggaggatttcgttggaaacgggattacgtataaaaagtagacagcagcatcctcagaaacttccttgtgatgtgtgcattcaagtcacagagttgaacattccctttcgtacagcagttttgaaacactctttctgtagtatctggaagtgaacattaggacaggtttcaggtctatggtgagaaaggaaatatcttcaaataaaaactagacagaagcattctcataaacttgtttgtgatgtgtgaactcagctaacagaggtggatctttcttttgatagagcagttctgaaaaacactttttgttgaatctgcaagtggacatttggatagatttgaagatttcgttggaaacgggaatatcttcatatcaaatatagacagaagcattcccagaaacgtctttttgatgtttgcattcaactcatagagttgaacattctctttcagagagcagctttgaagcactctttttgtagtatgtgcaaggggatatttggagcgctctgaggcctaaggtgaaaaagcaaatatcttcccataaccactagacagaaacattctcagaaactactttatgacgtatgtactcaactaacagagaagaaccttccttttgacagagcagttttgatacactctttttgtagaatctgcaagtggatatttggatagctgtgaagatttcgttggaaacgggaataccttcctataaaatctagacagaagcattctcagaaactgctctgtgatgtctgtattcaagtcacagagttgaacattgcctttcatagagcaggtttgaaacgctctttttgtagtatacggaagtggatgtttcggacggttggaggcccatggtgataaagggaatatcttcccctacaagctagaaagaagcattctgtgaaacttgtttgtgatgtgtgtactcaactaacagagttgaacctttctttttacagagcagttttgaaacactctttttgtagaatctgcgaggggatatttggatagatttcaggatttctttggaaacgggaatatcttcatataaaatctcgacagaagcattctcagaaacttctttgtgatatctgcattcaagtcacagagttgaatattccctttcacagagtaggattgaaacactctttttgtagtatctggaagaggacatttggagcaccttgacgcctgcggtgaaaagggaaatatcttcccataaaaactagacagaagcaatctcagaatcttctttgggatatatgcacgcagctaacagagttgtacctttctattgacagagcagttttgaaacagtctttctgtggaatctgcaagtggatatttggatagcttggaggatttcattggaaacgggattacatataaaaagtagacagcagcatcctcagaaacttctttgtgatgtgtgcattcaagtcacagggttgaacatttcctttcatacagcagttttgaaacactctttctgtagtatctggaagtgaacattaggacagctttcaggtctatggtgagaaaggaaatatcttcaaataaaaactagacacaagcattctcataaacttgtttgtgatgtgtgaactcagctaacagaggtggatctttcttttgatagagcagttctgaaaaacactttttgttgattatgcaagtggacatttggatagatttgaagatttcgttggaaacgggaatatcttcatatcaaatctagacagaagcattctcagaaacgtcgttgtgatgtttgcattcaactcatagagttgaacattccgtttcagagagcagctttgaggtactctttttgtagtatgtgcaagtggatatttggagcgctctgaggcctacggtgaaaaagcaaatatcttcccataaccactagacagaaacattctcagaaactcctttatgacgtatgcactcacctaacagagaagaaccttccttttgacagtgcagttttgatacactctttttgtagaatctgcaagtggttatttggatagctgcgaagatttccttggaaacgggaatatcttcctataaaatctagacagaagcattctcagaaactgctctatgatgtctgcattcaagtcacagagttgaacattgcctttcatggagcaggtttgaaacgctctttttgtagtatatggaagtggacgtttcggacggtttgaggcccatggtgataaagggaatatcttcccctacgagctagaaagaagcattctgtgaaacttgtttgtgatgtgtgtactcaactaacagagttgaacctttctttttacagagcagttttgaaacactctttttgtagaatctgcgaggggaagtttggatagatttcaggatttcgttggaaacgggaatatcttcatataaaatctcgacagaaagcattctcagaaacttctttgtgatatctgcattcaagtcacagagttgaatattccctttcacagagtaggtttgaaacactctttttgtagtatctggaagtggacatttggagcgccttgacgcctacggtgaaaagggaaatatcttctcataaaaactagacagagcaatctcagaatcgtctttgggatatatgcacgcagctaacagagttgaacctttctatagacagagcagttttgaaacagtctttctgtggaatctgcaagtggatatttggatagcttggaggatttcgttggaaacgggattacgtataaaaagtagacagcagcatcctcagaaacttctttgtgatgtgtgcattcaagtcacagagttgaacattccctttcgtacagcagttttgaaacactctttctgtagtatctggaagtgaacattagtacagctttcaggtctatggtgagaaacgaaatatcttcaaataaaaactagacagaagcattctcataaacttgtttgtgatgtgcgaactcagctaagagaggtggatctttcttttgatagagcagttctgaaaaacactttttgttgaatctgcaagtggacatttggatagatttgaagatttcgttggaaacgggaatatcttcatatcaaatctagacagaagcattctcagaaacgtctttgtgatgtttgcattcaactcatagagttgaacattccgtttcagagagcagctttgaagcactctttttgtagtatgtgcaactggatatttggagcgctctgaggcctacggggaaaaagcaaatatcttcccataaccactagacagaaacattctcagaaacttctttatgacgtatgtactcaactagcagagaagaactttccttttgacagagcacttttgatacactctttttgtagtatctgcaagtggatatttggatagctgtgaagatttcgttttaaacgggaatatcttcctataaagtctggagagaagcattctcagaaactgctctgtgatgtctgcattcaagtcacagagttgaacattgcctttcctagagcaggtttgaaacgctctttttgtagtatatggaagtggacgtttcggacggtttgaggcccatggtgataaagggaatatcttcccctaaaagctagaaagaagcattctgtgaaacttgtttgtgatgtgtgtagtcaactaacagagttgaacctttctttttacagagcagttttgaaacactctttttgtagaatctgtgaggggatatttggatagatttcaggatttcgttggaaacgtgaatatcttcatataaaatctcgacagaagcattctcagaaacttctttgtgatatgtgcattcaagtcacagagttgaatattccctttcacagagtaggtttgaaacactctttttgtagtatctggaagtggacatttggagcgcattgacgcctacggtgaaaagggaaatatcttcccataaaacctagacagaagcaatctcagaatcttctttgggatatatgcacgcagctaacggagttgaatctttctattgacagagcagttttgaaacagtctttctgtggaatctgcaagtggatatttggatagcttggaggatttcgttggaaacgggattacgtataaaaagtagacagcagcatcctccgaaacttctttgtgatgtgtgcattcaagtcacagagtagaacattccctttcgtacagcagttttgaaacactctttctgtagtatctggaagtgaacattaggacagctttcagctctatggtgagaaaggaaatatcttcaaataaaaactagacagaagcattctcataaacttgtttgtgatgtgtgaactcagctaacagaggtgggactttcttttgatagagcagttctgaaaaacactttttgttgaatctgcaagtggacatttggatagatttgaagatttcgttggaaacgggaatatcttcatatcaaatctagacagaagcattctcagaaacgtcgttgtgatgttagcattcaactcatagagttgaacattccctttcagagagcagctttgaagcactctttttgtagtatgtgcaagtggacatttggagcgctttgaggcctacggggaaaaagcaaatatcttcccataaccactagacaggaacattctcagaaacttctttatgacgcatgtactcaactagcagagaagaactttccttttgacagagcatttttgatacattctttttctagtatctgcaagtggatatttggatagctgtgaagatttcgttggaaacgggaatatcttcctataaagtctggacagaagcattctcagaaactgctctgtgatgtctgcattcaagtcacagagttgaacattgcctttcatagagcaggtttgaaacgctctttttgtagtatatggaagaggacgttttgaacggtttgaggaccatggtgataaagggaatatcttcccctacaagctagaaagaagcattctgtgaaacttgtttgtgatgtttgtactcaactaacagagttgaacctttctttttacagagcagttttgaaacactctttttgtagaatctgcgaggggatatttggatagatttcaggatttcgttggaaacgggaatatcttcatataaaatctcgacagaagcattctcagaaacttctttgtgatatgtgcattcaagtcacagagttgaatattccctttcacagagtaggtttgaaacactctttttgtagtatctggaagtggacatttggagtgccttgacacctactgtgaaaagggaaatatcttcccataaaaactagacagaagcaatctcagaatcttctttgggatatatgcacgcagctaacagagttgaacctttctattgacagagcagttttgaaacagtctttctgtggaatctgcaagtggatatttggatagcttggaggatttcgttggaaacgggattatgtataaaaagtagacagcagcatactcagaaacttctttgtgatgtgtgcattcaagtcacagagttgaacattccctttcgtacagcagttttgaaacactctttctgtagtatctggaagtgaacattaggacagctttcaggtctatgctgagaaaggaaatatcttcaaataaaaactagacagaagcattctcataaacttctttgtgatgtgtgaactcagctaaccgaggtggatctttcttttgatagagcagttctgaaaaacactttttgttgaatctgcaagtggacatttggatagatttgaagatttcgttggaaacgggaataacttcatttcaaatctagacagaagcattctcagaaacgtctttgtgatgtttgcatttaactcatagagttgaacattccctttcagagaccagctttgaagcactctttttgtagcatgtgcaagtggacatttggagcgccctgaggcctacggggaaaaagcaaatatcttcccataaccactagacagaaacattctcagaaacttcctttatgacgtatgcactcacctaacagaaaagaaccttccttttgacagagcagttttgatacactctttttgtagaatctgcaagtggatatttggatagctgtgaagatttcgttggaaacgggaatatcttcctataaaatctagacagaagcattctcagaaactgctctgtgatgtctgcattcaagtcacagagttgaacattgcctttcatagagcaggtttgaagcgctctttttgtagtatatggaagtggatgtttcggacggttggaggcccatggtgataaagggaatatcttcccctacaagctagaaagaagcattctgtgaaacttgtttgtgatgtgtgtactcaactaacagagttgaacctttctttttacagagcagttttgaaacactctttttgtagaatctgcgaggggatatttggatagatttcaggatttcgttggaaacgggaatatcttcatataaaatctcgaccgaaagcattctcagaaacttctttgtgatatctgcattcaagtcacagagttgaatattccctttcacagagtaggtttgaaacactctttttgtagtatctggaagtggacatttggagcgccttgacacctacggtgaaaagggaaatatcttcccataaaaactagacagagcaatctcagaatcttctttgggatatatgcacgcagctaacagagttgaacctttctattgacagagcagttttgaaacagtctttctgtggaatctgcaagtggatatttggagagcttggagtatttcgttggaaacgggattaagtataaaaagtagacagcagcatcctcagaaacttctttgtgatgtgtgcattcaagtcacagagttgaacatttcctttcgtacagcagttttgaaacactctttctgtagtaactggaagtgaacattaggacagctttcaggtctatggtgagaaaggaaatatcttcaaataaaaactagacagaagcattctcataaacttgtttgtgatgtgtgaactcagctaacagaggcggatctttcttttgatagagcagttcggaaaaacactttttgttgaatctgcaagtggacatttggatagatttgaagatttcgttggaaacgggaatatcttcatatctaatctagacagaagcattctcagaaacgtctttgtgatgtttgcattcaactcatagagttgaacattccgtttcagagagcagctttgaggcactctttttgtagtatgtgcaagtggatatttggagcactctgaggcctacggtgaaaaagcaaatatcttcgaataaccactagacagaaacattctcagaaactcctttatgacgtatgcactcacctaacagagaagaaccttccttttgacagagcagttttgatacacgctttttgtagaatctgcaagtggatatttggatagctgtgaagattttgttggaaacgggaatatcttcctataaaatctagacagaagcattgtcagaaactgctctgtgatgtctgcattcaagtcacagagttgaacattgcctttcatagagcaggtttgaaacgctctttttgtagtatatggaagtagacgtttcggacggtttgaggcccatggtgataaagggaatatcttcccctacaagctagaaagaagcattctgtgaaacttgtttgtgatgtgtgtactcaactaacagagttgaacctttctttttacagagcagttttgaaacactctttttgtagaatctgcgaggggatatttggatagatttcaggatttggttggaaactggaatatcttcatataaaatactcgacagaagcattctcagaaacttctttgtgatatgtgcattcaagtcacagagttgaatattccctttcacagagtaggtttgaaacactctttttgtagcatctggaagtggacatttggagcgccttgacgcctacggtgaaaagggaaatatcttcccataaaaactagacagaagcaatctcagaatcttctttgggatatatgcatgcagctaacagagttgaacctttctattgacagagcagttttgaaacagtctttctgtggaatctgccagtggatatttggatagcttggaggatttcgttggaaacgggattacgtataaaaagtagacagcagcatcctcagaaacttctttgtgatgtgtgcattcaagtcacagtagttgaacattccctttcgtacagcagttttgaaacactctttctgtagtatctggaagtgaacattaggacagctttcagctctatggtgagaaaggaaatatcttcaaataaaaactagacagaagcattctcataaacttgtttgtgatgtgtgaactcagctaacagaggtggatctttcttttgatagagcagttctgaaaaacactttttgttgaatctgcaagtggacatttggatacatttgaagatttcgttggaaacgggaatatcttcatatcaaatctagacagaagcattctcagaaacgtctttctgatgtttgcattcaacccatagagttgaacattccgtttcagagagcagctttgaagcgctctttttgtagtatgtgcaaggggatattttgagcgctctgaggcctaaggtgaaaaagcaagtatcttcccataaccactagacagaaacattttcagaaactcctttatgacgtatgcactcacctaacagagaagaaccttccttttgacagagcagttttgatacactctttttgtagaatctgcaagtggatatttggatagctgtgaagatttcgttggaaaccggaatatcttcctataaaatctagacagaagcattctcagaaactgctctatgatgtctgcattcaagtcacagagttgaacattgcctttcatggagcaggtttgaaacgctctttttgtagtatatggaagtggacgtttcggacggtttgaggcacatggtgataaagggaatatcttcccctacgagctagaaagaagcattctgtgaaacttgtttgtgatgtgtgtactcaactaacagagttgaacctttctttttacagagcagttttgaaacactctttttgtagaatctgcaaggcgatatttggatagatttcaggatttcgttggaaacgggaatatcttcatataaaatctcgacagaagcattctcagaaacttctttgtgatatgtgcattcaagtcacagagttgaatattccctttcacagagtaggttagaaacactctttttgtagtatctggaagtggacatttggagcgccttgacacctacggtgaaaagggaaatatcttcccataaaaactagacagaagcaatctcagaatcttctttgggatatatgcacgcagctaacagagttgaacctttctattgacagagcagttttgaaacagtctttctgtggaatctgcaagtggtatttggatagcttggaggatttcgttggaaacgggattacgtataaaaagtagacagcagcatcctcagaaacttccttgtgatgcgtgcattcaagtcacagagttgaatattccctttcgtacagcagttttgaaacactctttctgtagtatctggaagtgaactttaggagagttttcaggtctatagtgagaaaggatatatcttcaaataaaaactagacagaaagcattctcataaacttgtttgtgatgtctgaactcagctaacagaggtggatctttcttttgatagagcagttctgaaaaacactttttgttgaatctgcaagtggacatttggatagatttgaagatttcgttggaaacgggaagatcttcatatcaaatctagacagaagcattctcggaaaacgtctttgtgatgtttgcattcaactcatagagttgaacattccgtttcagagagcagctttgaagcactctttttgtagtatatgcaagtggatatttggagcgctctgaggcctacggtgaaaaagcaaatatcttcccataaccactagacagaaacattctcagaaactcctttatgacgtatgcactcacctaacagagaagaaccttccttttgacagagcagttttgatacactctttttgtagaatctgcaagtggataattggatagctgtgaagatttcgttggaaacgggaatatcttcctataaaatccagacagaagcattctcagaaactgctctgtgatgtctgcattgaagtcacggagttgaacattgcctttcatagagcaggtttgaaacgctctttttgtagtatatggaagtggacgtttcggacggtttgaggcccatggtgataaagggaatatcttcccctataagctagaaagaagcattctgtgaaacttgtttgtgatgtttgtactcaactaacagagttgaacctttctttttacagagcagttttgaaacactctttttgtagaatctgcgaggggatatttggatacatttcaggatttcgttggaaatgggaatatcttcatagaaaatctcgacaaaagcattctcagaaacttctttgtgatatgtgctttcaagtcacagagttgaatattccctttcacagagtaggtttgaaacagtctttttgtagtatctggaagtggacatttggagcgccttgacgcctacggtgaaaagggaaatatcttcccataaaaactagacagaagcaatctcagaatcttctttgggttatatgcacgcagctaacagagttgaacctttctatggacagaggagttttgaaacagtctttctgtggaatctgcaagtggatatttggatagcttggaggatttcgttggaaacgggattacgtataaaaagtagacagcagcatcctcagaaacttctttgtgatgtgtgcattcaagtcacagagttgaacattccctttcgtacagcagttttgaaacagtctttctgtagtaactggaagtgaacattaggacagctttcagctctatggtgagaaaggaaatatcttcaaataaaaactagacagaagcattctcataaacttgtttgtgatgtgtgaactcagctaacagaggttgatctttcttttgatagagcagttctgaaaaacactttttgttgaatctgcaagtggacatttggatagatttgaagatttcgttggaaacgggaatatcttcatatcaagtctagacagaagcattctcagaaacgtctttgtgatgtttgcattcaactcatagagttgaacattccgtttcagagagcagatttgaagcactctttttgtagtatgtgcaagtggatatttggagcgctctgaggcctacggtgaaaaagcaaatatcttcccataaccactagacagaaacattctcagaaactcctttatgacgtatgcactcacctaacagagaagaaccttccttttgacagagcagttttcatacactctttttgtagaatctgcaagtggatatttggatagctgtgaagatttcgttggaaacgggaatatcttcctataaaatctagacagaagcattctcagaaactgctctgtgatgtctgcattcaagtcacagagttgaacattgcctttcatagagcaggtttcaaacactctttttttagtatatggaagtggacgattcggacggtttgaggaccatggtgataaaggaaatatcttcccctacaagatagaaagaagcattctgtgaaacttgtttgtgatgtgtgtactcaactaacagagttgaacctttctttttacagagcagttttgaaacactctttttgtagaatctgcgaggggatatttggatacatttcagcatttcgttggaaacgggaatgtcttcatataaaatatcgacagaagcattctcagaaacttctttgtgatatctgcattcaagtcacagagttgaatattccctttcacagagtaggtttgaaacactcattttgtagtatctggaagtggacattttgagcgccttgacacctacggtaaaaagggaaatatcttcccataaaaactagacagaagcaatctcagaatcttctttgggatatatgcacgcagctaacagagttgaacctttctattgacagagcagttttgaaacagtctttctgtggaatctgcaagtggatatttggatagcttggaggatttcgttggaaacgggattaggtataaaaagtagacagccgcatcctcagaaacttctttgtgatgtgtgcattcaagtcacagtgttgaacattccctttcgtacagcagttttgaaacactctttctgtagtatctggaagtgaacattaggacagctttcaggtcgatggtgagaaaggaaatatcttcaaataaaaactaaacagaagcattctcataaacttgtttgtgatgtctgaactcagctaacagaggtggatctttcttttgatagagcagttctgaaaaacactttctgttgaatctgcaagtggacatttggatagatttgaagatttcgttggaaacgggaagatcttcatatcaaatactagacagaagcattctcagaaacgtctttgtgatgtttgcattcaactcctagagttgaacattccgtttcagagagcagctttgaagcactctttttgtagtatgtgcaactggatatttggagcgctctgaggcctacggtgaaaaagcaaatatcttcccataaccactagacagaaacattttcagaaactcctttatgacgtatgcactcacctaacagagaagaaccttccttttgacagagcagttttgatacactctttttgtagtatctgcaggtggatatttggatagctgtgaagatttcgttggaaaccggaatatcttcctataaaatctagacagaagcattctcagaaactgctgtgtgatgtctgcattcaagtcacagagttgaacattgcctttcacagagcaggtttgaaatgctctttttgtagtatatggaagtggacgtttcagacggtttgaggcccatggtgaaaaagggaatatcttcccctacaagctagaaagaagcattctgtgaaacttgtttgtgatgtgtgtactcaagtaacagagttcaacctttctttttacagagcagttttgaaacactctttttgtagaatctgtgaggggatatttggatagatttcaggatttcgttggaaacgagaatatcttcatataaaatctcgacagaagcattctcagaagcttctttgtgatatgtgcattcaagtcacagagttgaatattccctttcacagagtaggtttgaaacactctttttgtagtatctggaagtggacattttgagcaccttgacgcctacggtgaaaagggaaatatcttctcataaaaagtagacagaagcaatctcagaatcttctttgggatatatgcatgcagctaacagagttgaacctttctattgacagcagttttgaaacagtctttctgtggaatctgcaagtggatatttggatagcttggaggatttcgttggaaacgggattacgtataaaaagtagacagcagcatcctcagaaacttctttgtgatgtgtgcattcaagtcacagagttgaatattccctttcgtacagcagttttgaaacactctttctgtagcatctggaagtgaacattaggacagctttcaggtctatggtgagaaaggaaatatcttcaaataaaaactataccgaagcattctcataaacttgtttgtgatgtgtgaactcagctaacagaggtggatctttcttttgatagagcagttcggaaaaacactttttgttgaatctgcaagtggacatttggatagatttgaagatttcgttggaaacgggaatatctttatatcaaatctagacagaagcattctcagaaacgtctttgtgatgtttgcattcaactcatagagttgaacattccgtttcagagagcagctttgaggcactctttttgtagtatgtgcaaggggatatttggagtgctctgaggcctcaggtgaaaaagcaaatatcttcccataaccactagacagaaactttctcagaaactcctttatgacgtatgcactcacctaacagagaagaaccttccttttgacagagcagttttgatacactctttttgtagaatctgcaagtggatatttggatacctgtgaagatttcgttggaaacgggaatatcttcctataaaatctagacagaagcattctcagaaactgctctgtgatgtctgcattcaagtcacagagttgaacattgcctttcatagagcaggtttgaaacgctctttttgtagtatatggaagtagacgtttcgtacggtttgaggcccatggtgataaagggaatatcttcccctacaagctagaaagaagcattctgtgaaacttgtttctgatgtgtgtactcaactaacagagttgaacctttctttttacagagcagttttgaaacactctttttgtagaatctgcgaggggatatttggatagatttcaggatttcgttggaaacgggagtatcttcatataaaatctcgacagaagcgttctgagaaacttcttggtgatgtttgcattcaagtcacagaattgaacattccctttaatagaacaggtttgaaacactctttttgtagtatctggaagtggacatttggagcgccttgacgcctacggtgaaaagggaaatatcttcccatcaaaactagacagaagcaatctcagaatcttctttgggatatatgcatgcagctaacagagttgaacctttctattgacagagcagttttgaaacagtctttctgtggaatctgcaagtggatatttggatagcttggaggatttcgttggaaacgggattaagtataaaaagtagacagcagcatcctcagaaacttctttgtgatgtgtgcattcaagtcacagagttgaacattccctttcgtacagcagttttgaaacactctttctgtagtatctggaagtgaacattaggacagctttcaggtctatggtgagaaaggaaatattttcaaataaaaactagacagaagcattctcataaacttgtttgtgatgtgtgaactcagctaacagaggtggatctttcttttgatagagcagttctgaaaaacactttttgtagaatctgcaagtggacatttggatagatttgaagatttcgttggaaacgggaatatcttcatatcaaatctagacagaagcattctcagaaacgtctttgtgatgtttgcattcaactcatagagttgaactttccgtttcagagagcagctttgaagcactctttttgtagtatgtgcaagtggacatttggagcgccctgaggcctacggggaaaaagcaaatatcttcccataaccactagacagaaacattctcagaaactcctttacgacgtatgcactcaccctaacagagaagaaccttccttttgacagagcagttttgatacactctttttgtagaatctgcaagtggatatttggatagctgtgaagatttcgttggaaacgggaatatcttcctataaaatctagacagaagcattctcagaaactgctctgtgatgtctgctttcaagtcacagagttgaacattgcctttcatagagcaggtttgaaacgctctttttgtagtatatggaagtggatgtttcggacggttggaggcccatggtgataaagggaatatcttcccctacaagctagaaagaagcattctgtgaaacttgtttgtgatgtctgtactcaactaacagagttgaacctttctttttacagagcagttttgaaacactctttttgtagaatctgcgaggggatatttggatacatttcaggatttcgttggaaacgggaatatcttcatataaaatctcgacagaagcattctcagaaacttcttgtgatatctgcattcaagtcacagagttgaatattccctttcacagagtaggtttgaaacactctttttgtagtatctggaagtggacatttggagcgccttgacccctacggtgaaaagggaaatatcttcccataaaaactagacagaagcaatctcagaatcttctttgggatatatgcacgcagctaacagagttgaacctttctattgacagatcagttttgaaacagtctttctgtggaatctgcaagtggatatttggatagcttggaggatttcgttggaaacgggattacgtataaaaagtagacagcagcatcctcagaaacttctttgtgatgtgtgcattcaagtcacagagttgaacattccctttcgtacagcagttttgaaacactctttctgcagtatctggaagtgaacattaggacagctttcaggtctatggtgagaaaggaaatatcttcaaataaaaactagacagaagcattctcataaacttgtttgtgatgtgtgaactcagctaacagaggtggatctttcttttgatagagcagttctgaaaaacactttttgttgaatctgcaagtggacatttggacagatttgaagatttcgttggaaacgggaataccttcatatcaaatctagacagaagcattctcagaaacgtctttgcgatgtttgcattcaactcatagagttgaacattccctttcagagagcagctgtgaggcactctttttgtagtatgtgcaagtggatatttggagcgctctgaggcctacggtgaaaaagcaaatatcttcccataaccactagacagaaacattctcagaaactcctttatgacttatgcactcacctaacagagaagaaccttccttttgacagagcagttttgatacactctttttgtagaatctgcaagtggatattggggtagctgtgaagatttcgttggaaacgggaatatcttcctataaaatctagacagaagcattctcagaaactgctctgtgatgtctgcattcaagtcacagtgttgaacattgcctttcctagagcagtttagaaacgctctttttgtagtatatggaagtggacgtttcggacggtttgaggaccatggtgataaagggaatatcttcccctacaagctagaaagaagcattctgtgaaacttgtttgtgatgtgtgtactcaactaacagagttgaacctttctttttacagagcagttttgaaacacgctttttgtagaatctgcgaggggatatttggatagatttcaggatttcgttgggaacgggaatatcttcatataaaatctcgacagaagcattctcagaaacttctttgtgatatctgcattcaagtcacagagttgaatattccctttcacagagtaggtttgaaacactctttttgtagtatctggaagtggacatttggagcgccttaacgcctacggtgaaaagggaaatatcttcccataaaaactagacagaagcaatctcagaatcttctttgggatatatgcacgcagctaacagagttgaacctttctattgacagagcagttttgaaacagtctttccgtggaatctgcaagtggatatttggatagcttggaagatttcgttggaaacgggattacgtatcaaatgtagacagcagcatcctcagaaacttccttgtgatgtgtgcattcaagacacacagttgaacattccctttcgtacagcagttttgaaacactctttctgtagtatctggaagtgaacattaggacagctttcaggtctatcgtgagtaaggaaatatcttcaaataaaaactagacagaagcattctcataaacttgtttgtgatgtgtgaactcagctaacagaggtggatctttctattgatagagcagttctgaaaaacactttttgttgaatctgcaagtggacatttggatagatttgaagatttcgttggaaacgggaatatcttcatatcaaatctagacagaagcattctcagaaacgtctttgtgatgtttgcattcaactcatagagttgaacattccgtttcagagagcagctttgaagcactctttttgtagtatgtgcaagtggatatttggagcgctcttaggcctacggtgaaaaagcaaatatcttcccataaccactagacagaaacattctcagaaactcctttatgacgtatgtactcaactaacagagaagaaccttcctttagacagagcagttttgatacactctttttgtagaatctgcaagtggatatttggatagctgtgaagatttcgttggaaacgggaatatcttcctataaaatctagacagaaacattctcaggaactgctctgtgatgtctgcattcaagtcacagagttgaacattgcctttcctagagcaaatttgaaacgctctttttgtagtatatggaagtggacgtttcggacggtttgagacccatggtgataaagggaatatcttcccctacaagctagaaagaagcattctgtgaaacttgtttgtgatgtgtgtactcaactaacagagttgaacctctctttttacagagcagttttgaaacactctttttgtagaatctgcgaggggatatttggatagatttcaggatttcgttggaaacgggaatatctttatataaaatctcgacagaagcattctcagaaacttctttgtgatatctacattcaagtcacagagttgaatattccctttcacagagtaggtttgaaacactctttttgtagtatctggaagtggacatttggagcgccttgacacctacggtgaaaagggaaatatcttcccataaaaactagacagaagcaatctcagaatcttctttgggatatatcgcacgcagctaacagagttgaacctttctattgacagagcagttttgaaacagtctttctgtggaatctgcaagtggatatttggatagcttggaggatttctttggaaacgggattacgtataaaaagtagacagcagcatcctcagaaacttctttgtgatgtgtgcattcaagtcacagagttgaacattccctttcgtacagcagttttgaaacactctttctgtagtatctggaagtgaacattaggacagctttcaggtctatggtgagaaaggaaatatcttcaaataaaaacttgacagaagcattttcataaacttgtttttgatgtgtgaactcagctaacagaggtggatctttcttttgatagagcagttctgaaaaacactttttgttgaatctgcaagtggacatttggatagatttgaagatttcgttggaaacgggaatatcttcctatcaaatctagacagaagcattctcagaaacgtctttgtgatgtttgcattcaactcatagagttgaacattccctttcagagagcagctttgaaacactctttttgtagtatgtgcaagtggatatttggagcgctctgaggcctacggtgaaaaagcaaatatcttcccataaccactagacagaaacattctcagaaactcctttatgacgtatgcactcacctaacagagaagaaccttccatttgacagagcagttatgatacactctttttgtagaatctgcaagtggatatttggatagctgtgaagatttcgctggaaacgggaatatcttcctataaaatctagacagaagcattctcagaagctgctctgtgatgtctgcattcaagtcacagagttgaacattgcctttcatagagcaggtttgaaacgctctttttgtagtatatggaagtggacttttcggacggtttgaggcccatggtgataaagggaatatcttcccctacaagctagaaagaagcattctgtgaaacttgtttgtgatgtgtgtactcaactaacagagttgaacctttcttttcacagagcagttttgaaacactctttttgtagaatctgcgaggggatatttggatagatttcaggatttcgttggaaacgggtatatcttcatataaaatctcgacagaagcattctcagaaactgctctgtgatatctgcattcaagtcacagagttgaatattccctttcacagagtaggtttgaaacactctttttgtagtatctggaagtggacatttggagcgccttgacgtctactgtgaaaagggaaatatcttcccatcaaatctagacagaagcaatctcagaatcttctttgggatatatgcacgcagcttacagagttgaacctttctattgacagagcagttttgaaacagtctttttgaggaatctgcaagtggatatttggatagcttggaggatttcgttggaaacggtattatgtataaaaagtagacagcagtattctcagaaactcctttgtgatgtgtgaattcaagtcacagagttcaacattccctttcgcagagcaggtttgaaccactctttctctagtatctggaagtgaacattacgagagctttcaggtccatggtgagaaaggaaatatcttcaaataaaaactagacagaagcattctcataaacttgtttgtgatgtctgaactcagctaacagaggtggatctttcttttgatacagcagttctgaaaaacactttttgttgaatctgcaagtggacatttggatagatttgaagatttcgttggaaacgggaatatcttcatatcaaatctagacagaagcattctcagaaacgtctttgcgatgtttgcattcaactcatagagttgaacattccgtttcagagagcagttttgaggcactctttttgtagtatgtgcaagtggatatttggagcgctctgaggcctacggtgaaaaagcaaatatcttcccataaccactagacagaaacattctcagaaactcctttatgacgtatgcactcacctaacagaaaagaaccttccttttgacagagcagttttgatacactcttttggtagaatctgcaagtggatatttggatagctgtgaagatttcgttggaaacgggaatatcttcctataaaatctagacagaagcattctcagaaactgctctgtgatgtctgcattcaagtcacagagttgaacattgcctttcatagaggaggtttgaaacgctctttttgtagtatatggaagtggacgtttcggacggtttgaggcccatggtaataaagggaatatcttcccctacaagctagaaagaagcattctgtgaaacttgtttgtgatgtgtgtactcaactaacagagttgaacctttctttttacagagcagttttgaaacactctttttgtagaatctgcgagggcatatttggatagatttcaggatttcgttggaaacgggaatatcttcatataaaatctcgacagaagcattctcagaaacttctttgtgatatgtgcattcaagtcacagagttgaatattccctttcacagagtaggtttgaaacactctttttgtagtatctggaagtggacatttggagcgccttcacacctacggtgaaaagggaaatatcttcccataaaaactagacagaagcaatctcagaatcttctttgggatatatgcacgcagctaacggagttgaacctttctattgacagaggagttttgaaacagtctttctgtggaatctgcaagtggatatttggatagcttggaggatttcgttggaaacgggattacgtataaaaagtagacagcagcatcctcagaaacttttttgtgatgtgtgcattcaagtcacagagttgaacattcccttttgtacagcagttttgaaacactctttctgtagtatctggaagtgaacattaggacagctttcaggtctatggtgagaaaggaaatatcttcaaataaaaactagacagaagcattctcataaacttgtttgtgatgtgtgaactcagcaaacagcggtggatctttcttttgatagagcagttctgaaaaacactttttgttgaatctgcaagtggacatttggatagttttgaagatttccttggaaaaaggaatatcttcatatcaaatctagacagaagcattctcagaaacgtctttgcgatgtttgcattcaactcatagagttgcacattccgtttcagagagcagctttgagacactctttttgtagtatgtgcaagtggatatttggagcgctctgaggcctacggtgaaaaagcaaatatcttcccataaccactagacagaaacattctcagaaactcctttacgacgtatgcactcacctaacagagaagaaccttccttttgacagagcagttttgatacactctttttgtagaatctgcaagtggatatttggatagctgtgaagattttgttggaaacgggaatatcttcctataaaatctagacagaagcattctcagaaactgctctgtgatgtctgcattcaagtcacagagttgaacattgcctttcatagagcaggtttgaaatgctctttttgctgtatatggaagtggacgtttcagacggtttgaggcccatggtgataaagggaatatcttcccctacaagctagaaagaagcattctgtgaaacttgtttgtgatgtgtgcactcaactaacagagttgaacctttctttttacagagcagttttgaaacactctttttgtagaatctgcgaggggatatttggatagatttcaggatttcgttggaaacgggaatatcttcatataaaatctcgacagaagcattctcagaaacttctttgtgatatctgcattcaagtcacagagttgaatattccctttcacagagtaggtttgaaacactctttttgtaatatctggaagtggacattaggagcgccttgacgcctacggtgaaaagggaaatatcttcccataaaaattagacagaagcaatctcagaatcttctttgggatatatgcacgcagcttacagagttgaacctttctattgacagagcagttttgaaacagtctttctgtggaatctgcaagtggatatttggatagcttggaggatttcgttggaaacgggattacgtataaaaagtagacagccgcatcctcagaaacttctctgtgatgtgtgcattcaagtcacagaattgaacattccctttcgtacagcagttttgaaacactttttctgtagcatctggaagagaacattaggacagctttcaggtctatggtgagaaaggaaatatcttcaaataaaaactagacagaaacattctcataaacttgtttgtcatgtgtgaactcagctaacagacgtggatctttcttttgatacagcagttttgaaaaacactttttgttgaatctgcaagtggacatttggatagatttgaagatttcgttggaaacgggaatatcttcatatcaaatctagacagaagcattctcagaaacgtctttgtgatgtttgcattcaactcatagatttgaacattccgtttcagagagcagctttgaagcactctttttgtagtatgtgcaaggggatatttggagcgctctgaggcctacggtgaaaaagcaaatatcttcccataaccactagacagaaacattctcagaaactcctttatgacgtatgcactcacctaacagagaagaaccttccttttgacagagcagttttgatacactctttttgtagaatctgcaagtggatatttggatagctgtgaagatttctttggaaacgggaatatcttcctataaagtatagacagaagcattctcagaaactgctctgtgatgtctgcattcaagtcacagagttgaacattgcctttcctagagcaggtttgaaacgctctttttgtagtatatggaagtggacgtttcagacggtttgaggcccatggtgataaagggaatatcttcccctacaagctagaaagaagcattctgtgaaacttgtttgtgatgtgtgtactcaactaacagagttgaacctttcttttcacagagcagttttgaaacactctttttgtagaatctgtgaggggatatttggatagatttcaggatttcgttggaaacgggaatatcttcatacaaaatctcgacagaagcattctcagaaacttccttctgatatgtgcattcaagtcacagagttgaatattccctttcacagagtaggtttgaaacactctttttgtagtatctggaagtggtcatttggagcgccttgacgcccacggtgaaaagggaaatatcttcccataaaaactagacagaagcaatctcagaatcttctttgggatatatgcacgcagctaacagagttgaacctttctattgacagagcagttttgaaacagtctttctgtggaatctgcaagtggatatttggatagattgcaggatttcgttggaaacgggattacgtataaaaagtagacagcagcatcctcagaaacttctttgtgatgtgtgcattcaagtcacagagttgaacattccctttcgtacagcagttttgaaacactctttctgtagcatctggaagtgaacattaggacagctttcaggtctatggtgagaaaggaaatatcttcaaataaaaactagacacaagcattctcatcaacttgtttgtgatgtgtgaactcagctaacagaggtggatctttcttttgatagagcagttctgaaaaacactttttgttgaatctgcaagtggacatttggatagatttgaagatttcgttggaaacgggaatatcttcatatcaagtctagacagaagcattctcagaaacgtctttgtgatgtttgcattcaactcatagagttgaacattccgtttcagagagcagctttgaagcactctttttgtagtatgtgcaagtggatatttggagcgctgtgaggcctacggtgaaaaagcaaatatcttcccatagccactagacagataaacattctcagaaactcctttatgacgtatgcactcacctaacagagaagaaccttccttttgacagagcagttttgatacactctttttgtagaatctgcaagtggatatttggatagctgtgaagatttcgttggaaacgggaatatcttcctataaaatctagacagaagcattctcagaaactactctgtgatgtctgcattcaagtcacagagttgaacattgcctttcatagagcaggtttgaaacgctctttttgtagtatatggaagtgaacgtttcggacggtttgaggcccatggtgataaagggaatatcttcccctacaagctagaaagaagcattctgtgaaacttgtttgtgatgtgtgtactcaactaacagagttgaacctttctttttacagagcagttttgaaacactctttttgtagaatatgcgaggggatatttggatagatttcaggatttctttggaaacgggaatatcttcatataaaatctcgacagaagcattctcagaaacttctttgtgatatctgcattcaagtcacagagttgaatattccctttcacagagtaggtttgaaacactctttttgtagtatctggaagtggacatttggagcgccttgacgcctatggtgaaaagggaaatatcttctcataaaaagtagacacaagcaatctcagaatcttctttgggatatatgcacgctgctaacagagttgaacctttctattgacagagcagttttgaaacagtctttctgtggaatctgcaagtggatatttggatagcttggaggatttcgttggaaacgggattacgtataaaaagtagacagcagcatcctccgaaacttctttgtgatgtgtgcattcaagtcacagtagttgaacattccctttcgtacagcagttttgaaacactctttctgtagtatctggaagtgaacattaggacagctttcagctctatggtgagaaaggaaatatcttcaaataaaaactagacagaagcattctcataaacttgtttgtgatgtgtgaactcagctaacagaggtggatctttcgatagagcagttctgaaaaacactttttgttgaatctgcaagtggacatttggaaagatttgaagatttcgttggaaacgggaatatgttcatatcaaatctagacagaagcattctcagagacgtctttgtgatgtttgcattcaactcatagagttgaacattccctttcagagagcagctttgaagcactctttttgtagcatgtgcaagtggacatttggagcaccctgaggcctacggtgaaaaagcaaatatcttcccataaccactagacagaaacattctcagaaactcctttatgacgtatgccctcacctaacagaaaagaaccttccttttgacagagcagttttgatacactctttttgtagaatctgcaagtggatatttggatagctgtgaagatttcgttggaaacgggaatatcttcctataaaatctagacagaaacattctcagaaactgctctgtgatgtctgcattcaagtcacagagttgaacattgcctttcatagagcaggtttgaaacgctctttttgtagtatatggaagtggacgtttcggacggtttgaggcccatggtgatgaagggaatatcttcccctacaagctagaaagaagcattctgtgaaacttgtttgtgatgtgtgtactcaactaagagagttgaacctttcttttcacagagcagttttgaaacactctttttgtagaatctgcgaggggatatttggatacatttcaggatttcgttggaaacgggaatatcttcatacaaaatctcgacagaagcattctcagaagcttctttgtgatatgtgcatttaagtcacagagttgaatattccctttcacagagtaggtttgaaacactctttttgtagtatctggaagtggacatttggagcgccttgacgcctacggtgaaaagggaaatatcttctcataaaaagtagacacaagcaatctcagaatcttctttgggatatatgcacgcagctaacagagttgaacctttctattgacagagcagttttgaaacagtctttctgtggaagctgcaagtggatatttggataggttggaggatttcgttggaaacgggattacatataaaaagtagacagcagcatcctcagaaacttctttgtgatgtgtgcattcaagtcacagagttgaacattccctttcgtacagcagttttgaaacactctttctgtagtatctggaagtgaacattaggacagctttcagctctatggtgagaaaggaaatatcttcaaataaaaactagacagaagcattctcataaacttgtttctgatgtgtgaactcagctaacagaggtggatctttcttttgatagagcagttctgaaaaacactttttgttgaatctgcaagtggacatttggatagatttgaagatttctttgtaaacgggaatatcttcatatcaaatctagacagaagcattctcagaaacgtctttgtgatgttggcattcaactcatagagttgaacattcactttcagagagcagctttgaagcactctttttgtagtatgtgcaagtggatatttggagcgctctgaggcctacggtgaaaaagcaaatatcttcccataaccactagacagaaacattctcagaaactcctttgtgacgtatgtactcaactaacagagaagaactttccttttgacagagcatttttgatacactctttttgtactatctgcaagtggatatttggatagctgtgaagatttcgttggaaacgggaatatcttcccataaaacctagacagaagcattctcagaaactgctctgtgatgtctgcattcaagtcacagagttgaacattgcctttcatagagcaggtttgaaacgctcttttttgtagtatatggaagtggacttttcggacggtttgaggcccatggtgataaagggaatatcttcccctacaagctagaaagaagcattgtgtgaaacttgtttgtgatgtgtgtactcaactaacagagttgaacctttctttttacagagcagttttgaaacactctttttgtagaatctgcgaggggatatttggatagattccagcatttcgttggaaacgggaatatcttcatataaaatctcgacagaagcattctcagaaacttctttgtgataactgcattcaagtcacagagttgaatattccctttcaccgagtaggtttgaaacactctttttgtagtatctggaagtggacatttggagcgccatgacgcctacggtgaaaagggaaatatcttcccataaaaactagacagaagcaatctcagaatcctctttgggatatatgcacgcagctaacggagttgaacctttctattgacagagcagttttgaaacagtctttctgtggaatctgcaagtggatatttggatagcttggaggatttcgttggaaacgggattacgtataaaaagtagacagcagcctcctcagaaactttccttgtgatgtgtgcattcaagtcacagggttgaacattccctttcgtacagcagttttgaaacactctttctgtagtatctggaagtgaacattaggacagctttcaggtctatggtgagaaaggaaatatcttcaaataaaaactagacagaagcattctgataaacttgtttgtgaagtgtgatctcagctaacagaggtggatctttctattgatagagcagttctgaaaaacactttgttgaatctgcaagtggacatttggatagatttgaagatttcgttggaaacgggaatatcttcatatcaaatctagacagaagcattctcagaaacgtctttgcaatgtttgcattcaactcatagagttgaacattccgtttcagagagcagctttgaggcactctttttgtagtatgtgcaagtggatatttggagcgctcagaggcctacggtgaaaaagcaaatatcttcccataaccactaacagaaacattctcagaaactcctttatgaggtatgcactcacctaacagagaagaaccttccttttgacagagcagttttgatacactctttttgtagaatctgcaagtggatatttggatagctgtgaagatttcgttggaaacgggaatatcttcctataaaatctagacagaagcattctcagaaactgctctgtgttgtctgcattcaagtcacagagttgaacattgcctttcatagagcaggtttgaaacgctctttttgtagtatatggaagtggacttatcggacggtttgaggcccatggtgataaagggaatatcttcccctacaagctagaaagaagcattctgtgaaacttgtttgtgatgtgtgtactcaactaacagagttgaacctttctttttacagagcagttttgaaacactctttttgtagaatctgcgaggggatatttggatacatttcagcatttcgttggaaacgggaatatcttcataaaaaatctcgacagaagcattctcagaagcttctttgtgatatgtgcattcaagtcacagagttgaatattccctttcacagagtaggtttgaaacactctttttgtagtatctggaagtggacatttggagcgccttgacgcctacgttgaaaagggaaataccttctcataaaaagtagacagaagcaatctcagaatcttctttgggatatatgcacgcagcttacagagttgaacctttctattgacagagcagttttgaaacagtctttctgtggaatctgcaagtggatatttggatagcttggaggatttcgttggaaacgggattacgtataataagtagacagcagcatcctcagaaacttctttgtgatgtgtgcattcaagtcacagagttgaacattccctttcgtacagcagttttgaaacactctttctgtagtatctggaagtgaacattaggacagctttcaggtctatggagagaaaggaaatatcttcaaataaaaactagacagaagcattctcataaacttgtttgtgatgtgtgaactcagctaacagaggtggatctttcttttgatagagcagttctgaaaaacactttttgttgaatctgcaagtgcacatttggatagatttgaagatttcgttggaaacgggaatatcttcatatcaaatctagacagaagcattctcagaaacgtctttgtcacgtttgcattcaactcatagagttgaacattccctttcagagagcagctttgaaacactctttttgtagtatgtgcaagtggatatttggagcgctctgaggcctacggtgaaaaagcaaatatcttcccataaccactagacagaaacattctcagaaactcctttatgacgtatgcactcacctaacagagaagaaccttccttttgacagagcagttttgatatactctttttgtagaatctgcaagtggatatttggatagctgtgaagatttcgttggaaacgggaatatcttcctataaaatctagacagaagcattctcagaaactgctctgtgatgtctgcattcaagtcacagagttgaacattgcctttcatagagcaggtttgaaacactctttttttagtatatggaagtggacgtttcggacggtttgaggcccatggtgataaaggaaatatcttcccctacaagttagaaagaagcattctgtgaaacttgtttgtgatgtgtgtactcaactaagagagttgaacctttcttttcacagagcagttttgaaacactctttttgtagaatctgcgaggggatatttggatagatttcagcatttctttggaaacgggaatatcttcatataaaatctcgacagaagcattctcagaaacttctttgtgatatgtgcattcaagtcacagagttgaatattccctttcacagagtaggtttgaaacactctttttgtagtttctggaagtggacatttggagcgccttgacacctacggtgaaaagggaaatatcttcccataaaaactagacagaagcaatctcagaatcttctttgggatatatgcacgcagctaacagagttgaatctttctgttgacagagcagatttgaaacagtctttctgtggaatctgcaagtggatatttggatagcttggaggatttcgttggaaacgggattatgtataaaaagtagacagcagcatcctcagaaacttctttgtgatgtgtgcattcaagtcacagagttgaacattccctttcgtacagcagttttgaaacactgtttctgtagtatctggaactgaacattaggacagctttaaggtctatggtgagaaaggaaatatcttcaaataaaaactagacagaagcattctcatcaacttgtttgtgatgtgtgaactcagctaacaaaggtggatctttcttttgatagagcagttctgaaaaacacgatttgttgaatctgcaagtggacatttggatagatttgaagatttcgttggaaacgggaatatcttcatatcaaatctagacagaagcattctcggaaacgtctttgtcacgtttgcattcaactcatagagttgaacattccgtttcagagagcagctttgaagcactctttttgtagtatgtgcaaggggatatttggagcgctgtgaggcctacggtgaaaaagcaaatatcttcccataaccactagacagaaacattctcagaaactcctttatgacgtatgcactcacctaacagagaagaaccttccttttgacagagcagttttgatacactttttttgtagaatctgcaagtggatatttggatagctgtgaagatttcgttggaaacgggaatatcttcctataaaatctagacagaagcattctcagaaactgctctgtgatgtctgcattcaagtcacagagttgaacattgcctttcatagagcaggtttgaaacgctctttttgtagtatatggaagtggacgtttcggacggtttgagacccatggtgataaagggaatatattcccctacaagctagaaagaagcattctgtgaaacttgtttgtgatgtgtgtactcaactaacagagttgaacctttctttttacagagcagttttgaaacactctttttgtagaatctgcgaggggatatttggatacatttcaggatttcgttggaaacgggaataccttcatataaaatctcgacagaagcattctcagaaacttctttgtgatatctgcattcaagtcacagagttgaatattccctttcaccgagtaggttagaaacactctttttgtagtatctggaagtggacatttggagcgccttgacgcctacggtgaaaagggaaatatcttcccattaaaactagacagaagcaatctcagaatcttctttgggatatatgcacgcagctaacagagttgaacctttctattgacagagcagttttgaaacagtctttctgtggaatctgcaagtggatatttggatagttggaggatttcgttggaaacgggattacgtataaaaagtagacagcagcatcctcagaaacttctttgtgatgtgtgcattcaagtcacagagttgaacattccctttcgtacagcagtttggaaacactctttctgtagtatctggaagtgaacattaggacagctttcaggtctatggtgagaaaggaaatatcttcaaataaaaactagacagaagcattctcataaacttgttcgtgatgtgtgaactcagctaacacacgtggatctttcttttgatagagcagttctgaaaaacactttttgttgaatctgcaagaggacagttggatagatttgaagatttcgttggaaacgggaatatcttcatatcaaatctagacagaagcatctcagaaacgtctttgcgatgtttgcattcaactcatagagttgaacattccgtttcagagagcagctttgaggcactctttttgtagtatgtgcaagtggatatttggagcgctctgaggcctacggtgaaaaagcaaatatcttcccataaccactagacagaaacattctcagaaactcctttatgacgtatgcactcacctaacagaaaagaaccttccttttgacagagcagttttgatacactctttttgtagaatctgcaagtggatatttggatagctgtgaagatttcgttggaaacgggaatatcatcctataaaatctagacagaagcattctcagaaactgctctgtgatgtctgcattcaagtcacagagttgaacattgcctttcacagagcagctttgaaatgctctttttgtagtatatggaagtggacgtttcagacggtttgaggcccatggtgataaagggaatatcttcccctacaagctagaaagaagcattatgtgaaacttgtttgtgatgtgtgtactcaactaacagagttgaacctttctttttacagagcagttttgaaacactctttttgtagaatctgcgaggggatatttggatagatttcaggatttcgttggaaacgggaatatcttcatataaaatctcgacagaagcattctcagaaacttccttgtgatatgtgcattcaagtcacaggagttgaatattccctttcacaggagtaggtttgaaacactctttttgtagtatctggaagtggacatttggagcgccttgacgcctacggtgaaaagggaaatatcttcccataaaaactagacagaagcaatctcagaatcttctttgggatatatgcacgcagctaacagagttgaacctttctcttgacagagcagttttgaaacattctttctgtggaatctgcaagtggatatttggatagcttggaggatttcgttggaaacgggattatgtataaaaagtagacagcagcatcctcagaaacttctttgtgaagtgtgcattcaagtcacagagttgaacatcccgtttcgtacagcagttttgaaacactctttctgtagtatctggaagaaaacattaggacagctttcaggtctatggtgagaaaggaaatatcttcaaataaaaactagacagaagcattctcataaacttgtttgtgatgtgtgaactcagctaacagaggtggatcttcccttttgatagagcagttctgaaaaactcattttgttgaatctgcaagtggacatttggatagatttgaagatttcgttggaaacgggaatatcttcatatcaaatctagacagaagcattctcagaaacgtctttgcgatgtttgcattcaactcatagagttgaacattccgtttcagagagcagctttgaggcactctttttgtagtatgtgcaagtggatatttagagcgctctgaggcctacggtgaaaaagcaaatatcttcccataaccactagacagaaacattctcagaaactcctttatgacgtatgcactcacctaacagagaataaccttccttttgacagagcatttttgatacactctttttgtagcatctgcaagtggatatttggatagctgtgaagatttcgttggaaacgggaatatcttcctataaaatctagacagaagcattctcaggaactgctctgcgatgtctgtattcaagtcacagagttgaacattgcctttcatagagcaggtttgaaacgctctttttgtagtatatggaagtagacgtttcggacggtttgaggcccatggtgataaagggaatatcttcccctacaagctagaaagaagcattctgtgaaacttgtttgtgatgtgtgtactcaactaacagagttgaagctttctttttacagagcagttttgaaacactctttttgtagaatctgcgaggggatatttggatagatttcaggatttcgttggaaacgggaatatcttcatataaaatctcgacagaagcattctcagaaacttctttgtgatatctgcattcaagccacagagttgaatattccctttcacagagtagggttgaaacactctttttgtagtatctggaagtggacatttgcagcgccttgacacctacggtgaaaagggaaatatcttcccataaaaactagacagaagcaatctcagaatcttctttgggatatatgtacgcagctaatagagttgaacctttctattgacagagcagttttgaaacagtctttctgtggaatctgcaagtagatatttggatagcttggaggatttcgttggaaacgggattacgtataaaaagtagacagcagcatcctcagaaacttctttgtgatgtgtgcattcaagtcacagagttgaacattccctttcgtacagcagttttgaaacactctttctgtagtatctggaagtgaacattaggacagccttcaggtctatggtgagaaaggaaatatcttcaaataaaaactagacagaagcattctgataaacttgtttgtgaagtgtgatctcagctaacagaggtggatctttcttttgatagagcagttctgaaaaacactttgttgaatctgcaagtggacatttggatagatttgaagatttcgttggaaacgggaatatcttcatatcaaatactagacagaagcattctcagaaacgtctttgtgatgtttgcattcaactcatagagttgaacattccctttcagagagcagctttgaagcactctttttgtagtatgtgcaagtggatatttggagcgctctgaggcctacggtgaaaaagcaaatatcttcccataaccacaagacagaaacattctcagaaactcctttatgacgtatgcactcacctaacagagaagagccttccttttgacagagcagttttgatacactctttttgtagaatctgcaagtggatatttggatagctgtgaagatttcgttggaaacgggaatatcttcctataaaatctagacagaagcattctcagaaactgctctgtgatgtctgcattcaagtcacagagttgaacattgcctttcctagagcaggtttgaaacgctctttttgtagtatatggaagtggacgtttccgacggtttgaggcccatggtgataaagggaatatcttcccctacaagctagaaagaagcattctgtgaaacttgtttgtgatgtgtgtactcaactaacagagttgaaccttgcttttcacagagcagttttgaaacactctttttgtagaatctgcgagcggatatttggatagatttcaggatttcgttggaaacgggaatatcttcatataaaatctcgacagaagcattctcagaaacttctttgtgatatgtgcattcaagtcacagagttgaatattccctttcacagagtaggtttgaaacactctttttgtagtatctggaagtggatatttggagcaccttgacacctacggtgaaaagggaaatatcttcccataaaaactagacagaagcaatctcagaatcttctttgggatatatgcacgcagctaacagagttgaacctttctattgacagagcagtttagaaacagtctttctgtggaatctgcaagtggatatttggatagattggaggatttcgttggaaacgggattacgtataaaaagtagacagcagcatcctcagaaacatccttgtgatgtgtgcattcaagtcacagagttgaacattccctttcgtacagcagttttgaaacactctttctgtagtatctggaagtgaactttaggacagctttcaggtctatagtgagaaaggatatatcttcaaataaaaactagacggaagcattctcataaacttgtttgtgatgtgtgaactcagctaacagacgtggatctttcttttgatacagcagttttgaaaaacactttttgttgaatctgcaagtggacatttggatagatttgaagatttcgttggaaacgggaatatcttcatatcaaatctagacagaagcattctcagaaacgtctttgtgatgtttgcattcaactcatagcgagttgaacattccctttcagagagcagctttgaagcactctttttgtagtatgtgcaagtggatatttggagcgctctgaggcctacggggaaaaagcaaatatcttctccataaccactagacaggaacattctcagaaattcctttatgacgtatgcactcacgtaacagagaagaaccttccttttgacagagcagttttgatacactctttttgtagaatctgcaagtggatatttggatacctgtgaagatttcgttggaaacgggaatatcttcctataaaatctagacagaagcattctcagaaactgctctgtgatgtctgcattcaagtcacagagttgaacattgcctttcatagagcaggtttgaaacactctttttgtagtatatggaagtggacgtttcggacggtttgaggcccatggtgatttggggaatatcttcccctacaagctagaaagaagcattctgtgaaacttgtttgtgatgtgtgtactcaactaacagagttgaacctttctttttacagagcagttttgaaacactctttctgtagaatctgcgaggggatatttggatagatttcagcatttcgttggaaacgggaatatcttcatataaaatctcgacagaagcattctcagaaacttctttgtgataactgcattcaagtcacagagttgaatattccctttcaccgagtaggtttgaaacactctttttgtagtatctggaagtggacatttggagcgccatgacgcctacggtgaaaagggaaatatcttccaataaaaactagacagaagcaatttcagaatcttctttgggatatatgcacgcagctaacagagttgaacctttctattgacagagcagttttgaaacagtctttctgtggaatctgcaagcggatatttggatagttggaggatttcgttggaaacgggattacgtataaaaagtagacagcagcatcctgagaaacttactttgtgatgtgtgcattcaagtcacagagttgaacattccctttcgtacagcagtattgaaacactctttctgtagtatctggaagtgaacattaggacagctttcaggtctatggtgagaaaggaaatatcttcaaataaaaagtagacagaagcattctcataaacttgtttgtgatgtgtgaactcagctaagagacgtggatctttcttttgatagagcagttctgaaaaacactttttgttgaatctgcaagtggacatttggatagatttgaagatttcgttggaaacgggaatatcttcatatcaaatctagacagaagcattctcagaaacgtctttgtgatgtttgcattcaactcatagagttgaacattccgtttcagagaacagctttgaagcactctttttgtagtatgtgcaagtggatatttggagcgctctgaggcctacggtgaaaaagcaaatatcttcccataaccactagacagaaccattctcagaaactcctttatgacgtatgcactcacctaacagagaagaaccttccttttgacagagcacttttgatacactctttttgtagaatctgcaagtggatatttggatagctgtgaagatttcgttggaaacgggaatatcttcctataaaatctagacagaagtattctcagaaactgctctgagatgtctgcattcaagtcacagagttgaacattgcctttcatagagcaggtgtgaaacgctctttttgtagtatatggaagtggatgtttcggacggttggaggcccatggtgataaagggaatatcttcccctacaagctagaaagaagcattctgtgaaacttgtttgtgatgtgtgtactcaactaacagggttgaacctttctttttacagagcagttttgaaacactctttttgtagaatctgcgaggggatatttggatagatttcaggatttctttggaaacgggaatatcttcatataaaatctcgacagaagcattctcagaaacttctttgtcatatgtgcattcaagtcacagagttgaatattccctttcacagagtaggtttgaaacactctttttgtagtatctggaagtggacatttggagcgccttgacgcctacggtgaaaagggaaatatcttcccataaaaactagacagaagcaatctcggaatcttctttgggatatatgcacgcagctaacagagttgaacctttctattgacagagcagttttgaaacagtctttctgtagaatctgcaagtggatatttggatagcttggaggatttcgttggaaacgggattacgtataaaaagtagacagcagcatcctcagaaacttctttgtgatgtgtgcattcaagtcacagagttgaacattccctttcgtacagcagttttgaaacactctttctgtagtatctggaagtgaacattaggacagctttcagctctatggtgagaaacgaaatatcttcaaataaaaactagacagaagcattctcataaacttgtttgtgatgtgtgaactcagctaacagaggtggatctttcttttgatagagcagttctgaaaaccactttttgttgaatctgcaagtggacatttggatagatttgaagatttcgttggaaacgggaatatcttcatatcaaatctagacagaagcattctcagaaacgtctttgcgatgtttgcattcaactcatagagttgaacattccgtttcagagagcagctttgaggcactctttttatagtatgtgcaagtggatatttggagcgctctgaggcctacggtgaaaaagcaaatatcttcccataaccactagacagaaagcattctcagaaactgctctgtgatgtctgcattcaagtcacagagttgaacattgcctttcatagagcaggtttgaaatgctctttttgtagtatatggaagtggacttttcggacggtttgaggcccatggtgataaagggaatatcttcccctacaagctagaaagaagcattctgtgaaacttgtttgtgatgtgtgtactcaactaacagagttgaacatttcttttcacagagcagttttgaaacactctttttgtagaatctgcgagcggatatttggatagatttcaggatttcgttggaaacgggaatatcttcctataaaatctagacagaagcattctcagaaacttctttgtgatatgtgcattcaagtcacagatttgaatgttccctttcacagagaaggtttgaaacactctttttctagtatctggaagtggacatttggagcgccttgacgcctacggtgaaaagggaaatatcttcccataaaaactagacagaagcaatctcagaatcttctttgggatatatgcacgcagctaacagagttgaaccattctattgactgagcagatttgaaacagtctttctgtggaatctgcaagtggatatttggatagattggaggatttcgttggaaacgggattacgtataaaaagtagacagcagcatcctcagaaacttctttgtgatgtgtgcattcaagtcacagagttgaatattccctttcgtacagcagttttgaaacactctttctgtagtatctggaagtgaacattaggacagctttcaggtctatggtgagaaaggaaatatcttcaaataaaaactagacagaaagcattctcataaacttgtttgtgatgtgtgaactcagctaacagaggtggatctttcttttgatagagcagttcggaaaaacactttttgttgaatctgcaagtggacatttggatagatttgaagatttcgttggaaacgggaatatctttatatcaaatctagacagaagcattctcggaaacgtctttgtcatgtttgcattcaactcatagagttgaacattccgtttcagagagcagctttgaagcactctttttatagtatgtgcaaggggatatttggagtgctctgaggcctaaggtgaaaaagcaaatatcttcccataaccactagacagaaacattctcagaaactcctttatgacgtatgcactcacctaacagagaagaaccttccttttgacagagcagttttgatacactctttttatagaatctgcaagtggatatttggatagctgtgaagatttcgttggaaacgggaatatcttcctataaaatctatacagaagcattctcagaaactgctctgtgatgtctgcattcaagtcacagagttgaacattgcctttcctagagcaggtttgaaacgctcttttttagtatatggaagtggacgtttcagacggtttgaggcccatggtgttaaagggaatatcttcccctacaagctagaaagaagcattctgtgaaacttgtttgtgatgtgtgtactcaactaacagagttgaacctttcttttcacagagcagttttgaaacactctttttgtagaatctgcgaggggatatttggatagatttcagcatttcgttggaaacaggaatatcttcatataaaatctcgacagaagcattctcagaaacttctttgtgatatgtgcattcaagtcagagatttgaatattccctttcacagagtaggtttgaaacactctttttgtagtatctggaagtggtcatttggagcgccttgatgcccacggtgaaaagggaaatatcttcccataaaaactagacagaagcaatctcagaatcttctttgggatatatgcacgcagttaacagagttgaacctttctattgacagagcagttttgaaacagtctttctgtggaatctccaagtggatatttggatagcttggaggatttcgttggaaacgggattacgtataaaaagtagacagcagcatcctcagaaacttctttgtgatgtgtgcattcaagtcacaggagttgaacattccctttcatacagcagttttgaaacactctttctgtagtatctggaagtgaacattaggacagctttcagctctatggtgagaaaggaaatatcttcaaataaaaactagacagaagcattctcctaaacttgtttgtgatgtgtgaactcagctaacagacgtggatctttcttttgatacaggagttttgaaaaacactttttgttgaatctgcaagtggacatttggatagatttgaagatttcgttggaaacgggaatatcttcatatcaaatctagacagaaagcattctcagaaacgtctttgtgatgtttacattcaactcatagagttgaacattccctttcagagagcagctttgaagcactctttttgtagcatgtgcaagtggacatttggagcgctctgaggtctacggggaaaaagcaaatatcttcccataaccactagacagaaacattctcagaaactcctttatgatgtatgcactcacctaacagagaagaaccttccttttgacagagcagttttgatacactctttttgtagaatctgcaagtggatatttggatacctgtgaagatttcgttggaaacgggaatatcttcctataaaatgtagacagaagcattctcagaaactgctctgtgatgtctgcattcaagtcacagagttgaacattacctttcatagagcaggtttgaaacgctctttttgtagtatatggaagtggatgtttcggacggttggaggcccatggtgataaagggaatatcttcccctacaagctagaaagaagcattctgtgaaagttgtttgtgatgtgtgtactcaactaaccgagttgaacctttctttttacagagcagttttgaaacactctttttgtagaatctgcgaggggatatttggatagatttcaggatttcgttggaaacgggaatatcttcatataaaatctcgacagaagcattctcagaaacttctttgtgatatctgcattcaagtcacagagttgaatattccctttcacagagtaggtttgaaacactctttttgtagtatctggaagtggacatttggagcgccttgacacctaccgtgaaaagggaaatatcttcccataaaaactagacagaagcaatctcagaatcttctttgggatatatgcacgcagctaacagagttgaacctttctattgacagagcagttttgaaacagtctttctgtggaatccgcaagtggatatttggatagcttggaggatttcgttggaaacgggattacgtataaaaagtagacagcagcatcctcagaaacttctttgtgatgtgtgcattcaagtcacagagttgaacattcccttttgtacagcagttttgaaacactctttctgtagtatctggaagtgaacattaggacagctttcagctctatggtgagaaaggaaatatcttcaaataaaaactagacagaagcattctcagtaaacgtctttgtgatgtttgcattcaactcatagagttgaacattccgtttcagagagcagctttgaagcactctttttgtagtatgtgcaaggggatatttggagcgctctgaggcctacggtgaaaaagcaaatatcttcccataaccactagacagaaacattctcagaaattcctttatgacgtatgcactcacctaacagagaagaaccttccttttgacagagcagttttgatacactctttttgtagaatctgcaagtggatatttggatacctgtgaagatttcgttggaaacgggaataacttcctataaaatctagacagaagcattctcagaaactgctctgtgatgtctgcattcaagtcacagagttgaacattgcctttcatagagcaggtttgaaacactctttttgtagtatatggaagtggacgtttcggacggtttgaggcccatggtgatttagggaatatcttcccctacaagctagaaagaagcattctgtgaaacatgcttgcgatgtgtgtactcaactaacagtgttgaacctttctttttacagagcagtttggaaacactctttttgtagaatctgcgaggggatatttggatagatttcaggatttcgttgaaaacgggaatatcttcatataaaatctcgacagaagcattctcagaaacttccttgtgatatgtgcattcaagtcacagagttgaatattccctttcacagagtaggtttgaaacactctttttgtagtatctggaagtggacatttggagcgccttgacggcccacggtgaaaagggaaatatcttcccataaaaactagacagaagcaatctcagaatcttctttgggatatatgcacgcagttaacagagttgaacctttctattgacagagcagttttgaaacagtctttctgtggaatctgcaagtggatatttggatagcttggaggatttcgttggaaatgggattacgtataaaaagtagacagcagcatcctcagaaacttctttgtgatgtgtgcattcaagtcacagagttgaacattccctttcgtaaagcagttttgaaacactctttctgtagtatctggaagtgaacattaggacagctttcaggtctatggtgagaaaggaaatatcttcaaataaaaactagacagaagcattctcataaacttgtttgtgatgtgtgaactcagctaacagaggtggatctttcttttgatagagcagttctgaaaaacactttttgttgaatctgcaagtggacatttggatagatttgaagatttctttggaaacgggaatatctatatatcaaatctagacagaagcattctcgaaaacgtctttgtgatgtttgcattcaactcatagagttgaacattccgtttcagagagcagctttgaggcactcattttgtagtatgtgcaagtggatatttggagcgctctgaggccttcggtgaaaaagcaaatatcttcccataaccactagacagaaacattctcagaaactcctttatgacgtatgtactcaactaacagagaagaaccttctttttgacagtgcagttttgatacactctttttgtagaatctgcaagtgcatatttggatagctgtgaagatttcgttggaaacgggaatatcttcctataaaatctagacagaagcattctcagaaactgctctgtgatgtctgcattcaagtcacagagttgaacattgcctttcatagagcaggtttgaaacgctctttttgtagtatatggaagtggatgtttcggacggttggaggcccatggtcataaagggaatatcttcccctacaagctagaaagaagcattctgtgaaacttgtttgtgatgtgtgtactcaactaacagagttgaacctttctttttacagagcagttttgaaacactctttttgtagaatctgcgaggggatatttggatagatttcaggatttcattggaaacgggaatatcttcatataaaatctcgacagaagcattctcagaaacttctttgtgatatctgcattcaagtcacagagttgaatattccctttgacagagtaggtttgaaacactctttttgtagtatctggaagtggacatttggagcgccttgacacctacggtgaaaagggaaatatcttcccataaaaactagacagaagcaatctcagaatcttctttgggatatatgcacgcagctaacagagttgaacctttctattgacagagcagttttgaaacagtctttctgtggaatctgcaagtggatatttggatagcttggaggatttcggtggaaacgggattacgtataaaaagtagacagcagcatcctcagaaacttctttgtgatgtgtgcattcaagtcacagagttgaacattccctttcgtacagcagttttgaaacactctttctgtagtatctggaagtgaacattaggacagctttcaggtctatggtgagaaaggaaataacttcaaataaaaactagacagaagcattctcataaatttgtttgtgatgtgtgaactcagctaacagacgtggatctttcttttgatacagcagttttgaaaaacactttttgttgagtctgcatgtggacatttggatagatttgaagatttcgttggaaacgggaatatcttcatatcaaatctagacagaagcattctcagaaacgtctttgtgatgtttgcattcaacccatagagttgaacattccgtttcagagagcagctttgaagcactctttttgtagtatgtgcaaggggatattttgagcgctctgaggcctaaggtgaaaaagcaaatatcttcccataaccactagacagaaacattctcagaaacccctttatgacgtatgcactcacctaacagagaagaaccttccttttgactgagcagttttgatacactctttttgtagaatctgcaagtggatatttggatagctgtgaagatttcgttggaaacgggaatatcttcctataaaatctagacagaagcattctcagaaactgctctgtgatgtctgcattcaagtcacagagttgaacattgcctttcatagagccggtttgaaacgctctttttgtagtatatggaagtggatgtttcggacggttggaggcccatggtgataaagggaatatcttcccctacaagctagaaagaagcattctgtgaaacttgtttgtgatgtgtgtactcaactaacagagttgaacctttctttttacagagcagttttgaaacactctttctgtagaatctgcgaggggatatttggatagatttcaggatttcgttggaaaccggaatatcttcatataaaatctcgacagaagcattctcagaaaattctttgtgatatgtgcattcaagtcacagagttgaatattccctttcacagagtaggtttgaaacactcttttagtagtatctggaagtggacatttggagcgccttgacgcctacggtgaaaagggaaatatcttcccataaaaactagacagaagcaatctcagaatcttctttgggatatatgcacgcagctaacagagttgaacctttctattgacagagcagttttgaaacagtctttctgtggaatctgcaagtggatatttggatagattggaggatttcgttggaaacgggattacgtataaaaagtagacagcagcatcctcagaaacttctttgtgatgtgtgcattcaagtcacagggttgaacattccctttcgtacagcagttttgaaacactctttctgtagtatctgggagtgaacattaggacagctttcaggtctatggtgagaaaggaaatatcttcaaataaaaactagacagaagcattctcataaacttgtttggtgatgtgtgaactcagctaacagaggtggatctttcttttgatagagcagttctgaaaaacactttttgttgaatctgcaagtggacattcggatagatttgaagatttcattggaaacgggaatatcttcatatcaaatctagacagaatcattcccagaaacgtctttgtgatgtttgcattcaactcatatagttgaacattccctttcagagagcagctttgaagcactctttttgtagtatgtgcaaggggatatttggagcgctctgaggcctacggtgaaaaagcaaatatcttcgcataaccactagacagaaacattctcagaaactcctttatgacgtatgcactcacctaacagagaagaaccttccttttgacagagcagatttgatacactctttttatagaatctgcaagtggatatttggatagctgtgaagatttcgttggaaacgggaatatcttcctataaaatctagacagaagcattctcagaaactgctctgtgatgtctgcattcaagtcacagagttgaacattgcctttcatagagcaggtttgaaacgctctttttgtagtatatggaagttgacgtttcggacggtttgaggcccatggtgataaagggaatatcttcccctacaagctagaaagaagcattctgtgaaacttgtttgtgatgtgtgtactcaactaacagagttgaacctttctttttacagagcagttttgaaacactctttttgtagaatctgcgaggggatatttggatagatttcaggatttcgttggaaacgggaatatcttcaaataaaatctcgacagatgcattctcagaaacttctttgtgatatgtgcattctagtcacagagttgaatattccctttcatagagtaagtttgaaacactctttttgtactatctggaagtggacatttggagcgccttgacgcctacggtgaaaagggaaatatcttcccataaaaactagacagaagcaatctcagaatcttctttgggatatatgcacgcagctaacagagttgaacctttctattgacagagcagttttcaaacagtctttctgtggaatctgcaagtggatatttagatagcttggaggatttcgttggtaacgggattacgtataaaaattagcagcatcctcagaaacttccttgtgatgtgtgcattcaagacacagagttgaacattccctttcgtacagcagttttgaaacactctttctgtagtatctggaagtgaacattaggacagctttcaggtctatcgtgagaaaggaaatatcttcacataaaaactagacagaagcattctcataaacttgtttgtgatgtgtgaactcagctaacagacgtggatctttcttttgatatagcagttttgaaaaacactttttgttgaatctgcaagtggacatttggatagatttgaagatttcgttggaaacgggaatatcttcatatcaaatctagacagaagcattctcagaaacgtctttgtgatgtttgcattcaacccatagagttgaacattccgtttcagagagcagctttgaagcactctttctgtagtatgtgcaaggggatattttgagcgctctgaggcctaaggtgaaaaagcaaatatcttcccataaccactagacagaaacattctcagaaactcctttatgacgtatgcactcacctaacagagaagaaccttccttttgactgagcagttttgatacactctttttgtagaatctgcaagtggatatttggatagctgtgaagatttcgttggaaacgggaatatcttcctataaaatctagacagaagcattctcagaaactgctctgtgatgtctgcattcaagtcacagagttgaacattgcctttcgtagagcaggtttgaaacgctctttttgtagtatatggaagtggacgtttcggacggtttgaggcccatggtgataaagggaatatcttcccctacaagctagaaagaagcattctgtgaaacttgtttgtgatgtgtgtactcaactaacagagttgaacctttctttttacatagcagttttgaaacactctttttgtagaatctgcgaggggatatttggatagatttcaggattttgttggaaacgggaatatcttcatataaaatctcgacagaagcattctcagaaacttccttgtgatatgtgcattcaagtcacagagttgaatattccctttcacagagtaggtttgaaacactctttttgtagtatctggaagtggacatttggagcgtcttgacacctacggtgaaaagggaaatatcttcccataaaaactagacagaagcaatctcagaatcttctttgggatatatgcacgcagctaacagagttgaacctttctattgccagagcagttttgaaacagtctttctgtggaatctgcaagtggatatttggatagcttggaggatttcgttggaaacgggattacgtataaaaagtagacagcagcatcctcagaaacttctttgtgatgtgtgcattcaagtcacagaagttgaacattccctttcgtacagcagttttgaaacactctttctgtagtatctgcaagtgaacattaggacagctttcaggtctgtggtgagaaaggaaatatcttcaaataaaaactagacagaagcattctcataaacttgtttgtgatgtgtgaactcagcttacagaggtggatctttcttttgatagagcagttctgaaaaacactttttgttgaatctgcaagtggacatttggatagattttaagatttcgttggaaacgggaatatcttcatatcaaatctagacagaagcattctcagaaacgtcgttgtaatgtttgcattcaactcatagagttgaacattccgattcagagagcagctttgaggcactctttttgtagtatgtgcaagtggatatttggagcgctctgaggcctacggtgaaaaagcaaatatcttcccataaccactagacagaaacattctcagaaacttctttatgacgtatgtactcaactaacagagaagaaccttccttttgacagagcagttttgatacactctttttgtagaatctgcaactggatatttggatagctgtgaagaattcgttggaaacgggaatatcttcctataaaatctaaagaaaagcattctcagaaactgctctgtgatgtctgcattcaagtcacagagttgaacattgcctttcatagagcaggtttgaaacgctctttttgtagtatatggaagttgacgtttcacacggtttgaggcccatggtgataaaggaaatatcttcccctacaagctagaaagaagcattgtgtgaaacttgtttgtgatgtgtgtactcaactaacagagttgaacctttctttttacagagtagttttgaaacactctttttgtagaatctgcgcggggatatttggatacatttcaggatttcgttggaaacgggaatatcttcatataaaatctcgacagaaagcattctcagaaacttctttgtgatatgtgcattcaagtcacagagttgaatattccctttcacagagtaggtttgaaacactctttttgtagtatctggaagtggacatttggagcgccttgacacctacggtgaaaagggaagtatcttcccatcaaaactagacagaagcaatctcagaatcttctttgggatatatgcacgcagctaacagagttgaacctttctattgacagagcagttttgaaacagtctttctgtggaatctgcaagtggatatttggatagcttggaggatttcgttggaaacgggattatgtataaaaagtagacagcagcatcctcagaaacttctttgtgatgtgtgcattcaagtcacagagttgaacattccctttcgtacagcagttttgaaacactctttctgtagtatctggaagtgaacattaggacagctttcaagtctatggtgagaaaggaaacatcttcaaataaaaactagacagacgcattctcataaacttgtttgtgatgtgtgaactcagctaacagaggtggatctttcttttgatagagcagttctgaaaaacactttttgttgaatctgcaagtggacatttggatagatttgaagatttcgttggaaacgggaatatcttcatatcaaatctagacagaagcattgtcagaaacgtctttgtcatgtttgcattcaactcatagagttgaacattccctttcagagagcagctttgaaacactctttttgtagtatgtgcaagtggatatttggagcgctttgaggcctacggggaaaaagcaaatatcttcccataaccactagacagaaacattctcagaaactcctttatgacgtatgcactcacctaacagaaaagaaccttccttttgacagagcagttttgatacactctttttgtagaatctgcaagtggatatttggatagctgtgaagatttcgttggaaacgggaatatcttcctataaatctagacagaagcattctcaggaactgctctgtgatgtctgcattcaagtcacagagttgaacattgccttaactagagcaggtttgaaacgctctttttgtagtatatggaagtggacgtttcggacgttttgaggcccatggtgatgaagggaatatcatcccctacaagctagaaagaagcattgtgtgaaacttgtttgtgatgtgtgtactcaactaacagagttgaacctttctttttacagagcagttttgaaacactctttttgtagaatctgcgaggggatatttggatacatttcaggatttcgttggaaacgggaatatcttcatataaaatctcgacagaagcattctcagaaacttctttgtgatatctgccttcaagtcacagagttgaatattccctttcacacagtaggtttgaaacactctttttgtagtatctggaagtggacatttggagcgccttgacacctacggtgaaaagggaaatatcttcccataaaaactagacagaagcaatctcagaatcttctttgggatatatgcacgcagctaacagagttgaacctttctattgacagagcagttttgaaacagtctttctgtggaatctgcaagtggatatttggatagcttggaggatttcgttggaaaagggattacgtataaaaagtagacagcagcatcctcagaaacttctttgtgatgtgtgcattcaagtcacagagttgaacattccctttcgtacagcagtattgaaacactctttctgtagtatctggaagtgaacattaggacagctttcaggtctatggtgagaaaggaaatatcttcaaataaaaactagacagaagcattctcataaacttgtttgtgatgtatgaactcagctaacagaggtggatctatcttttgatagagcagttctgaaaaacactttttgttgaatctgcaagtggacatttggatagttttgaagatttcgttggaaacgggaatatcttcatatcaaatctagacagaagcattctcagaaacgtctttgtgatgtttgcattcaacccatagagttgaacattccctttcagagagcagctttgaagcactctttttgtagtatgtgcaaggggatatttggagcgctctgaggcctaaggtgaaaaatcaaatatcttcccataaccactagacagaaacattctcagaaacttctttatgacgtatgtactcaactagcagagaagaactttccttttgacacagctttttggatacactctttttgtagtatctgcatgtggatatttgattagctgtgaagatttcgttggaatcgggaatatcttcctataaagtctggacagaagcattctcagaaactgctctgtgatgtctgcattcaggtcacagagttgaacattgcctttcatagagcaggtttaaaacactctttttttactatatggaagtggacgtttcggacggtttgaggcccatggtgataaaggaaatatcttcccctagaagcaagaaagaagcattctgtgaaacttgtttgtgatgtgtgtactcaactaacagagttgaacctttctttttacagagcagttttgaaacactctttttgtagaatctgcgaggggatatttggatagatttcaggatttctttggaaacgggaatatcttcatataaaatactcgacagaagcattctcagaaacttctttgtgatatctgcattcaagtcagagagttgaatattccctttcacagagtaggtttgaaacactctttttgtagtatctggaagtggacatttggagcgccttgacacctacggtgaaaagggaaatatcttcccataaaaactagacagaagcaatctcagaatcttctctgggatatatgcacgcagctaacagagttgaacctttctattgacagagcagttttgaaacagtctttctgtggaatctgcaagtggatatttggatagcttggaggatttcgttggaaacgggattacgtacaaaaagtagacagcagcatcctcagaaacttctttgtgatgtgtgcattcaagtcacagagttgaacattccctttcatagagcagttttgaaacactgtttctgtagtatctggaagtgaacattaggacagctttcaggtctatggtgagaaaggaaatatcttcaaataaaaactagacagaagcattctcataaacttgtttgtgatgtgtgaactcagctaacagacgtggatctttcttttgatacagcagttttgaaaaacacattttgttgaatctgcaagtggacatttggatagatatgaagatttcgttggaaacgggaatatattcatatcaaatctagacagaagcattctcagaaacgtctttgtgatgtttgcattcaactcatagagttgaacattccctttcagagagcagctttgaagcactctttttgtagcatgtgcaagtggacatttggagcgccctgaggcctacggggaaaaagcagatatcttcccataaccactagacagaaacattctcagaaactcctttatgatgtatgcactcacctaacggaaaagaaccttccttttgacagagcagttttgatacactctttttgtagaatctgcaagtggatatttggatagctgtgaagatttcgttggaaacgggaatatcttcctataaaatctagacagaagcattctcagaaactgctctgtgatgtctgcattcaagtcacagagttgaacattgcctttcatagagcaggtttgaaatgttctttttgtagtatatggaagtggacgtttcagacggtttgaggccgatggtgataaagggaatatcttcccctacaagctagaaagaagcattctgtgaaacttgtttgtgatgtgtgtactcaagtaacagagttgaacctttctttttacagagcagttttgaaacactctttttgtagaatctgcgaggggatatttgtatagatttcaggatttcgttggaaacgggaatatcttcatataaaatctcgacagaagcattctcagaaacttcattgtgatatctgcattcaagtcacagagttgaatattccctttcacagggtaggtttgaaacactctttttgtagtatctgtaagtggacatttggagcgccttgacacctaaagtgaaaagggaaatatcttcccataaaaactagacagaagcaatctcagaatcttctttgggatatatgcacgcagctaacagagttgaacctttctattgacagagcagttttgaaacagtctttctgtggaatctgcaagtggatatttggatagcttggaggatttctttggaaacgggattacgtataaaaagtagacagcagcatcctcagaaacttctttgtgatgtatgcattcaagtcccagagttgaacattccctttcgtacagcagttttgaaacactctttctgtagtatctggaagtgaacattaggacagatttcaggtctatggtgagaaaggaaatatcttcaaataaaaagtagacagaagcattctcataaacttgtttgtgatgtgtgaactcagctaacagaggtggatctttcttttgatagagcagttctgaaaaacactttttgttgaatctgcaagtggacatttggatagatttgaagatttcgttggaaacgggaatatcttcatatcaaatctagacaggaaagcattctcagaaacgtctttgtgatgtttgcattcaactcacagtatttgaacattccctttcagagagcagctttgaagcactctttttgtagtatgtgcaaggggatatttggagcgctctgaggcctacggtgaaaaagcaaatatcttcccataaccactagacagaaacattctcagaaacttctttatgacgtatgtactcaactagcagaaaagaactttccttttgacagagcttttttgatacactctttttgtagtatctgcaagtggatatttggatagctgtgaagatttctttggaatcgggaatatcttcctataaagtctggacagaagcattctcagaaactgctctgtgatgtctgcattcaagtcacagagttgaacattgcctttcatagagcaggtttcaaacactctttttttagtatatggaagtggacgtttcggacggtttgaggcccatggtgataaaggaaatatcttcccctacaagctagaaagaagcattgtgtgaaacttgtttgtgatgtgtgtactcaactaacagagttgaacctttctttttacagagcagttttgaaacactctttttgtagaatctgcaaggggatatttggatagatttcaggatttcgttggacacgggaatatcttcatataaaatctcgacagaagcattctcagaaacttgtttgtgatatgtgcattcaagtcacagagttgaatattccctttcacagagtaggtttgaaacactctttttgtaatatctggaagtggacatttggagcgccttgacgcctacggtgaaaagggaaatatcttcccataaaaactagacagaagcaatctcagaatcttctttgggatatatgcacgcagctaacagagttgaacctttctattgacagagcagttttgaaatagtctttctgtggaatctgcaagtagatatttggatagcttggaggatttcgttggaaacgggattacgtataaaaagtagacagcagcatcctcagaaacttctttgtgatgtgtgcattcaagtcacagagttgaacattccctttcgtacagcagttttgaaacactctttctgtagtatctggaagtgaacattaggacagctttcagctccatggtgagaaaggaaatatcttcaaataaaaactagacagaagcattctcataaacttgtttgtgatgtgtgaactcagctaacagaggtggatctttcttttgatagagcagttctgaataacactttttgttgaatctgcaagtggacatttggatagatttgaagatttcgttggaaacgggaatatcttcatatcaaatctagacagaaacattctcagaaacgtctttgtgatgtttgcattcaactcatggagttgaacattccctttcagagagcagctttgaagcactctttttgtagtatgtgcaagtggatatttggagcgctctgtggcctacggggaaaaagcaaatatcttcccataaccactagacagaaacattctcagaaactcctttatgacgtatgtactcaactaacagagaagaaccttctttttgacagagcagttttgatacactctttttgtagaatctccaagtggatatttggatagctgtgaagatttcgttggaaacgggaatatcttcctataaaatctagacagaagcattctcagaaactgctctgtgatgtctgcattcaagtcacagagttgaacattgcctttcatagagcaggtttgaaacgctctttttgtagtatataaaagtggacgtttcggacggtttgaggcccatggtcataaagggaatatcttcccctacaagctagaaagaagcattctgtgaaacttgtttgtgatgtgtgtactcaactaacagagttgaacctttctttttacagagcagttttgaaacactctttttgtagaatctgcgaggggatatttggatagatttcaggatttcgttggaaacgggaatatctttatataaaatctcgacagaagcattctcagaaacttctttgtgatatgtgcattcaagtcacagagttgaatattccctttcacagagtaggtttgaaacactctttttgtagtatctggaagtggacatttggagcgccttgacacctacggtgaaaagggaaatatcttcccataaaaactagacagaaagcaatctcagaatcttctttgggatatatgcacgcagctaacagagttgaacctttctattgacagagcagttttgaaacagtctttctgtggaatctgcaagtggatatttggatagcttggaggatttcgttggaaacgggattaagtataaaaagtagacagagcatcctcagaaacttctttgtgatgtgtgcattcaagtcacagagttgaacattccctttcgtacagcagtgttgaaacactctttatgtagtatctggaagtgaacattaggacagctttcaggtctatggtgagaaaggaaatatcttcaaataaaaactagacagaagcattctcataaacttgtttgtgatgtgtgaactcagctaacagaggtggatctttcttttgatagagcagttctgaaaaacactttttgttgaatctgcaagtggacatttggatagatttgaatatttcgttggtaacgggaatatcttcatatcaaatctagacagaagcattctcagaaacgtctttgcgatgtttgcattcaactcatagagttgaacattccgtttcagagagcagctttgaggcaatctttttgtagtatgtgcaagtggatatttggagcgctctgaggcctacggtgaaaaagcaaatatcttcccataaccactagacagaaacattctcagaaactcctttatgacgtatgcactcacctaacagagaagaaccttccttttgacagagcagttttgatacactctttttgtagaatctgcaagtggatatttggatagctgtgaagatttcattggaaacgggaatatcttcctataaaatctaaacagaagcattctcagaaactgctctgtgatgtctgcattcaagtcacagagttgaacattgcctttcatagagcagttttgaaacgctctttttgtactatatggaagaggacgtttcggacggtttgaggcccatggtgataaagggaatatcttcccctacaagctagaaagaagcattctgtgaaacttgtttgtgatgtgtgtactcaactaacagagttgaacctttctttttacagagcagttttgaaacactcttcttgtagaatctgcgaggggatatttggatagatttcaggattttgttggaaacgggaatatcttaatataaaatctcgacagaagcattctcagaagcttctttgtgatatgtgcattcaagtcacagagttgaatattccctttcaccgagtaggtttgaaacactctttttgtagtatctggaagtggacatttggagcgccttgacgcctacggtgaaaagggaaatatcttcccataaaaactagacagaagcaatctcagaatcttctttgggatatatgcacgcagctaacagagttgaacctttctattgacagagcagttttgaaacagtctttctgtggaatctgcaagtgggatatttggatagcttggaggatttcgttggaaacgggattaagtataaaaagtagacagcagcctcctcagaaacttctctgtgatgtgtgcattcaagtcacagagttgaacattccctttcgtacagcagttttgaaacactctttctgtagtatctggaagtgaacattaggacagctttcaggtctatggtgagaaaggaaatatattcaaataaaaactagacagaagaattctcatcaacttgtttgtgatgtgtgaactcagctaacacacgtggatctttcttttgatagagcagttctgaaaaacactttgttgaatctgcaagtggacatttggatagatttcaagatttcgttggaaacgggaatatcttcatatcaaatctagacagaagcatcctcagaaacgtcttgtgatgtttgcattcaactcatagagttgaacattccgtttcagagagcagctttgaagcactctttttgtagtatgtgcaaatggatatttggatcgctgtgaggcctaaggtgaaaaagcaaatatcttcccataaccactagacagaaacattctcagaaactcctttatgacgtatgcactcacctaacagagaagaaccttccttttgacagagcaattttgatacactctttttgtagaatctgcaagtggatatttggatagctgtgaagatttcgttggaaacgggaatatcttcctataaaatctagacagaagcattctcagaaactgctctgtgatgtctgcattcaagtcacagagttgaacattgcctttcatagagcaggtttgaaacgctctttttgtagtatatggaagtggacatttcggacggtttgaggcccatggtgataaagggaatatcttcccctacaagctagaaagaagcattctgtgaaacttgtttgtgatgtgtgtactcaagtaacagagttgaacctttctttttacagagcagttttgaaacactctttttgtagaatctgcgaggggatatttggatagatttcaggatttcgttggaaacgggaatatcttcatacaaaatctcgacagaagcattctcagaaacttctttgtgatatctgccttcaagtcacagagttgaatattccctttctcagagtaggtatgaaacactctttttgtagtatctggaagtggacatttggagcgacttgacacctacggtgaaaagggaaatatcttcccataaaaactagacagaagcaatctcagaatcttctttgggatatatgcacgcagctaacagagttgaacctttctattgaccgagcagttttgaaacagtctttctgtggaatctgcaagtggatattttgatagttggaggatttcgttggaaacgggattacgtataaaaagtagacagccgcatcctcagaaacttctttgtgatgtgtgcattcaagtcacagagttgaacattccctttcgtacagcagttttgaaacactctttctgtagtatctggaagtgaacattaggacagctttcaggtcgatggtgagaaaggaaatatcttcaaataaaaactaaacagaagcattctcataaacttgtttgtgatgtgtgaactcagctaacagacgtggatctttcttttgatacagcagttttgaaaaacactttttgttgaatctgcaagtggacatttggatagatttgaagatttccgttggaaacgggaatatcttcatatcaaatctagacagaagcattctcagaaacgtctttgtgatgtttgcattcaactcatagagttgaacattccgtttcagagagcagctttgaagcactctttttgtagtatgtgcaaggggatattttgagcgctctgaggcctaaggtgaaaaagcaaatatcttcccataaccactagacagaaacattctcagaaactcctttatgacgtatgtactcaactaacagagaagaaccttccttttgacagagcagttttgataccctctttttgtagaatctgcaagtggatatttggatagctgtgaagatttcgttggaaacgggaatatcttcctataaaatctagacagaagcattctcagaaactgctctgtgatgtctgcattcaagtcacagagttgaacattgcctttcatagagcaggtttgaaacgctctttttgttgtatatggaagtggacgtttcggacggtttgaggcccatggtgataaagggaatatcttcccctacaagctagaaagaagcattgtgtgaaacttgtttgtgatgtgtgtactcaactaacagagttgaacctttctttttacagagcagttttgaaacactctttttgtagaatctgcgagcggatatttggatagatttcaggatttcgttggaaacgggaatatcttcatataaaatctcgacagaagcattctcagaaacttctttgtgatatctgcattcaagtcacagagttgaatattccctttcacagagtaggattggaacactctttttgtagtatctggaagtggacatttggagcgccttgacgcctacggtgaaaagggaaatatcttcccataaaaactagacagaagcaatctcagaatcttctttgggatatatgcacgcagctaacagagttgaacctttctattgacagagcagttttgaaacagtctttctgtggaatctgcaagtggatatttggatagcttggaggttttctttggaaacgggattacgtataaaaagtagactgcagcatcctcagaaacttctttgtgatgtgtgcattcaagtcacagagttgaacattccctttcgtacagcagttttgaaacactctttctgtagtatctggaagtgaacattaggacagctttcaggtctatggtgagaaaggaaatatcatcaaatgaaaactagacagaagcattctcataaacttgtttgtgatgtgtcaactcagctaagagaggtggatctttcttttgatagagcagttctgaaaaacactttttgttgaatctgcaagtggacatttggatagatttgaagatttcgttggaaacgggaatatcttcatatcaaatctagacagaagcattctcggaaacgtctttgtgatgtttgcattcaactcaaggagttgaacattcactttcagagagcagctttgaagcactctttttgtagtatgtgcaagtggatatttggatcgctctgaggcctaaggtgaaaaagcaaatatcttcccataaccactagacagaaacattctcagaaactcctttatgacgtatgcactcacctaacagaaaagaaccttccttttgacagagtagttttgatacactctttttgtagaatctgcaagtggatatttggatagctgtgaagatttcgttggaaacgggaatatcttcctataaaatctagacagaagcattctcagaaactgctctgtgatgtctgcattcaagtcacagagttgaacattgcctttcatacagcaggtttgaaacgctctttttgtagtatatggaagtggacttatcggacggtttgaggcccatggtgataaagggaatatcttcccctacaagctagaaagaagcattctgtgaaacttgtttgtgatgtgtgtactcaactaacagagttgaacctttctttttacagagcagttttgaaacactctttttgtagaatctgtgaggggatatttggatagatttcaggattttgttggaaacgggaatatcttcatataaaatctcgacagaagcattctcagaaccttctttgtgatatctgcattcaagtcacagagttgaatattccctttcactgagtaggtttgaaacactctttttgtagtatctggaagtagacatttggagcgccttgacgcctacggtgaaaagggaaatatcttctcataaaaagtagacagaagaaatctcagaatcttctttgggacatatgcacgcagctaacagagttgaacctttctattgacagagcagttttgaaacagtctttctgtggaatctgcaagtggatatttggttaaattggaggatttcgttggaaacgggattacgtataaaaatagacagcagcatcctcagaaacttctttgtgatgtgtgcattcaagtcacagagttgaacattccctttcgtacagcagttttgaaacactctttctgtagtatctggaagtgaacattaggccagctttcaggtctatggtgagaaaggaaatatcttcaaataaaaactagacagaagcattctcataaacttgtttgtgatgtgtgaactcagctaacagaggtggatctttcttttgatagagcagttttgaaaaacactttttgttgaatctgcaagtggacatttggatagatatgaagatttcgttggaaacgggaatatcttcatatcaaatctagacagaaagcattctcagaaacgtctttgtgatgtttgcattcaactcatagagttgaacattccgtttcaaagagcagctttgaggcactctttttgtagtatgtgcaagtggatatttggagcgctctgaggcctacggtgaaaaagcaaatatcttcccataaccactagacagaaacattctcagaaactcctttatgacgtatgcactcacctaacagagaagaaccttccttttgacagagcagttttgatacactctttttgtagaatctgcaagtggatatttggatagctgggaagatttcgttggaaacgggaatatcttcctataaaatctagacagaagcattctcagcaaactgctctgtgatgtctgcattcaagtcacagagttgaacattgcctttcatagagcaggtttgaaacgctctttttgtagtatatgtaagtagacgtttcggacggtttgaggcccatggtgataaagggaatatcttcccctacaagctagaaagaagcattctgtgaaacttgtttgtgatgtgtgtactcaactaacagagttgaacctttctttttacagagcagttttgaaacactctttttgtagaatctgcgaggggatatttggatagatttcaggatttcgatggaaacgggaatatcttcatataaaatctcgacagaagcattctcagaaacttctttgtgatatctgcattcaagtcacagagttgaatattccctttcacagagtaggtttgaaacactctttttgtagtatctggaagtggacatttggagcaccttgacacctatggtgaaaagggaaatatcttccgataaaaactagacagaagcaatctcagaatcttctttgggatatatgcacgcagctaacagagttgaacctttctattgacagagcagttttgaaacagtctttctgtggaatctgcaagtggatatttggatagcttggaggatttcgttggtaacgggattacgtataaaaagtagacagcagcatcctcagcaaacttctttgtgatgtgtgcattcaagtcacagtagttgaacattccctttcgtacagcagttttgaaacactctttctgtagtatctggaagtgaacattaggacagctttcaggtctatggtgagaaaggaaatatcttcaaataaaaactagacagaagcattctgataaacttgtttgtgaagtgtgaactcagctaacagaggtggatctttcttttgatagagcagttctgaaaaacactttttgttgaatctgcaagtggacatttggatagatttgaagatttcgttggaaacgggaatatcttcatatcaaatactagacagaagcattctcagaaacgtctttgtgatgtttgcattcaactcatagagttgaacattccctttcagagagcagctttgaagcactctttttgtagtatgtgcaagtggacatttggagcgctctgaggcctacggtgaaaaagcaaatatcttcccataaccactagacagaaacattctcagaaactcctttatgacgtatgcactcacctaacagagaagaaccttccttttgacagaggagttttgatacactctttttgtagaatctgcaagtggatatttggatagctgtgaagatttcgttggaaacgggaatatcttcctataaaatctagacagaagcattctcagaaactgctctgtgatgtctgcattcaagtcacagagttgaacattgcctttcatagagcaggtttgaaacgctctttttttagtatatggaagtggacttatcggacggtttgaggcccatggtgataaagggaatatcttcccctacaagctagaaagaagcattctgtgaaacttgtttgtgatgtgtgtactcaactaacagagttgaacctttctttttaaagagcagttttgaaacactctttttgtagaatctgcgaggggatatttggatagatttcaggatttcgttggaaacgggaatatcttcttataaaatctcgacagaagcattctcagaaacttctttgtgatatctgcattacagtcacagagttgaatattccctttcacagaggaggtttgaaacactctttttatagtatctggaattggacattggagcgccttgacgcctacggtgaaaagggaaatatcttcccataaaaactagacagaagcaatctcagaatcttctttgggatatatgcacgcagctaacagagttgaacctttctattgacagagcagttttgaaacagtctttctgtggaatctgcaagtggatatttggatagcttggaggatttctttggaaacgggattacgtataaaaagtagacagcaccatcctcagaaacttctttgtgatgtgtgcattcaagtcacagagttgaacatcccgtttcgtacagcagttttgaaacactctttctgtagtatctggaagtaagcattaggataagcattaggacagctttcaggtctatggtgagaaaggaaatatcttcaaataaaaactagacagaagcattctcataaacttgtttgtgatgtgtgaactcagctaacagaggtggatacttcttttgatagagcagttctgaaaaacacttttagttgaatctgcaagtggacatttggatagatttgaagatttcgttggaaacgggaatatcttcatatcaaatctagacagaagcattctcagaaacgtctttgtgatgtttgcattcaactcatagagttgaacattccgtttcagagagcagctttgaagcactctttttgtagtatgtgcaagtggatatttggatcgctgtgaggcctaaggtgaaaaagcatatatcttcccataaccactagacagaaacattctcagaaactgctttatgacgtatgcactcacctaacagagaagaaccttccttttgacagagcagctttgatacactctttttgtagaatctgcaagtggatatttggatagctgtgaagatttcgttggaaacgggaatatcttcctataaaatctagacagaagcattctcagaaactgctctgtgatgtctgcattcaagtcacagagttgaacattgcctttcatagagcaggtttgaaacgctctttttgtagaatatggaactggatgtttcggacggttggaggcccatggtgataaagggaatatcttcccctacaagctagaaagaagcattgtgtgaaacttctttgtgatgtgtgtactcaactaacagagttgaacctttctttttacagagcagttttgaaacactctttttgtagaatctgcaaggggatatttggatacatttcaggatttcgttggaaacgggaatatcttcatataaaatctcgacagaagcattctcagaaacttctttgtgatatctgcattcaagtcacagagttgaatattccctttcacagagtaggtttgaaacactctttttgtagtatctggaagtggacatttggagcgtcttgacacctacggtgaaaagggaaatatcttcccataaaaactagacagaagcaatctcagcaatcttctttgggatatatgtacgcagctaatagagttgaacctttctattgacagagcagttttgaaacagtctttctgtggaatctgcaagtggatatttggatagcttggaggatttcgttggaaacgggattacgtataaaaagtagacagcagcatcctcagaaacttctttgtgatgtgtgcattcaagtcacagagttcaacattccctttcgtacagcagttttgaaacactctttctgtagtatctggaagtgaacattaggacagctttcaggtctatggtgagaaaggaaatatcttcaaataaaaactatacagaagcattctcataaacttgtttgtgatgtgtgaactcagctaacagaggtggatctttcttttgatagtgcagttctgaaaaacactttttgttgaatctgcaagtggacatttggatagatttgaagatttcgttggaaacgggaatatcttcatatcaaatctagacagaagcattctcagaaacgtctttgcgatgtttgcattcaactcatagagttgaacattccgtttcagagagcagctttgaagcactctttttgtagtatgtgcaaggggatatttggagcgctctgaggcctacggtgaaaaagcaaatatcttcccataatcactagacagaaacattctcagaaactcctttatgacgtatgcactcatctaacagagaagaaccttccttttgacagagcagttttgatacactctttttgtagaatctgcaagtggatatttggatagctgtgaagatttcgttggaaacgggaatatcttcctataaaatctagacagaagcattctcagaaactgctctgtgatgtctgcattcaagtcacagagttgaacattgcctttcatagaggaggtttcaaacactctttttgtagtatatggaagtggacgtttcggacggtttgaggcccatggtgataaagggaatatcttcccctacaagctagaaagaagcattctgtgaaacttgtttgtgctgtgtgtactcaactaacagagttgaacctttctttttacagagcagttttgaaacactctttttgtagaatctgcgaggggatatttggatagatttcaggatttcgttggaaacgggaatatcttcatataaaatctcgacagaagcattctcagaaacttctttgtgatatgtgcattcaagtcacagagttgaatattccctttcagagagtaggtttgaaacactccttttgtagtatctggaagtggacatttggagcgccttgacgcctacggtgaaaagggaaatatcttcccataaaaactagacagaagcaatctcagaatcttctttgggatatatgcacgcagctaacagagttgaacctttctattgacagagcagttttgaaatagtctttctgtggaatctgcaagtagatatttggatagcttggaggatttcgttggaatcgggattacgtataaaaagtagacagcagcatcctcagcaaacttctttgtgatgtgtgcattcaagtcacagagttgaacattccctttcgtacagcagttttgaaacactctttctgtagtaactggaagtgaacactaggacagctttcaggtctatggtgagaaaggaaatatcttcaaataaaaactagacagaagcattctcataaacttgtttgtgatgtgtgaactcagctaacagaggtggatctttcttttgatagagcagttctgaaaaacactttttgatgaatctgcaagtggacatttggatagatttgaagatttcgttggaaacgggaatatcttcatatcaaatctagacagaagcattctcagaaacgtctttgtgatgcttgcattcaactcatagtagttgaacattcccttccagagagcagctttgaagcactctttttatagtatgtgcaaggggatatttggagcgctctgaggcctaaggtgaaaaagcaaatatcttcccataaccactagacagaaacattctcagaaactcctttatgacgtatgcactcaactaacagaaaagaaccttccttttgacagagcagttttgatacactctttttgtagaatctgcaagtggatatttggatagctgtgaagatttcgttggaaacgggaatatcttcctataaaatctagacagaagcattctcagaaactgctctgtgatgtctgcattcaagtcacagagttgaacattgcctttcatagagcaggtttgaaacgctctttttgtagtatatggaagtagacgtttcggacggtttgaggcccatggttataaagggaatatcttcccctacaagctagaaagaagcattccgtgaaacttgtttgtgatgtgtgtactcaactaacagagttgaaccttccttttcacagagcagttttgaaacactctttttgtagaatctgcgaggggatatttggatagatttcaggatttcgttggaaacgggaatatcttcatataaaatctcgacagaagcattctcagaaacttctttgtgatatgtgcattcaagtcacagagttgaatattccctttcacagagtaggtttgaaacactctttttgtagtatctggaagtggacatttggagcgccttgacacctacggtgaaaagtgaaatatcttcccataaaaactagacagaagcaatctcagaatcttctttgagatatatgcacgcagctaatagagttgaacctttctattgacagagcagttttgaaacagtctttctgtggaatctgcaagtggatatttggatagcttggaggatttcgttggaaacgggattacgtataaaaagtagacagcagcatcctcagaaacttccttgtgatgtgtgcattcaagtcacagagttgaacattccctttcatacagcagttttgaaacactctttctgtagtatctggaagtgaacattaggacagctttcaggtctatggtgagaaaggaaatatcttcaaataaaaactagacagaaagcattctcataaacttgtttgtgatgtgtgaactcagctaacagaggtggatctttcttttgatagagcagttctgaaaaacactttttgttgaatctgcaagtggagatttggatagatttgaagatttcgttggaaacgggaatatcttcatatcaaatctagacagaagcattctcagaaacgtctttgtgatgtttgcattcaactcatagagttgaacattccgtttcagagagcagctttgaagcactctttttgtagtatgtgcaagtggatatttggagagctctgacgcctacggtgaaaaagcaaatatcttcccataaccactagacagaaacattctcagaaactcctttatgacgtatgcactcacctaacagagaagaaccttccttttgacagagcaggtttgatacactctttttgtagaatctgcaagtggatatttggatagctgtgaagattttgttggaaacgggaatatcttcctataaaatctagacagaagcattctcagaaactgctctgtgatgtctgcattcaagtcacagagttgaacattgcctttcatagagcaggtttgaaacgctctttttgtagtatatggaagtggatgtttcagacggttggaggcccatggtgataaagggaatatcttcccctacgagctagaaagaagcattctgtgaaacttgtttgtgatgtgtgtactcaactaacagagttgaacctttcttttcacagagcagttttgaaacactctttttgtagaatctgcgaggggatatttggatagatttcagcatttcgttggaaacgggaatatcttcatataaaatctcgacagaagcattctcagaaacttctttgtgatatgtgcattcaagtcacagagttgaatattccctttcacagagtaggtttgaaacactctttttgtagtgtctggaagtggacatttggagcgccttgacgcctacggtgaaaagggaaatatcttcccataaaaactagacagaagcaatctcagaatcttctttgggatatatgcacgcagctaacagagtttaacctttctattgacagagcagttttgaaacagtgtttctgtggaatctgcaagtggatatttggatagattggaggatttcgttggaaacgggattacatataaaaagtagacatcagcatcctcagaaacttctttgtgatgtgtgcattcaagtcacagagttgaacattccctttcgtacagcagttttgaaacactctttctgtattatctgggagtgaacattaggacagctttcaggtctatggtgagaaaggaaatatcttcaaataaaaactagacagaaagcattctcataaacttgtttgtgatgtgtgaactcagctaacagaggtggatctttcttttgatagagcagttctgaaaaacacttttttttgaatctgcaagtggacatttggatagatttgaagatttctttggaaacgggaatatcttcatatcaaatctagacagaagcattctcagaaacgtctttgtgatgtttgcattcaactcatagagttgaacattccgtttcagagagcagctttgaagcactctttttgtagtatgtgcaagtggatatttggagcgctctgaggcctacggggaaaaagcaaatatcttcccataaacactagactgaaacattctcagaaactcctttatgacgtatgcactcacctaacagagaagaaccttccttttgacagagcagttttgatacactctttttgtagaatctgcaagtgcatatttggatagctgtgaagatttcgttggaaacgggaatatcttcctataaaatctagacagaagcattctcagaaactgctctgtgatgtctgcattcaagtcacagagttgaacattgcctttcatggagcaggtttgaaacggtctttttgtagtatatggaagtggacgattcggacggtttgagtcccatggtgataaagggaatatcttcccctacaagctagaaagaagcattctgtgaaacttgtttgtgatgtgtgtactcaactaacagagttgaacctttctttttacagagcagttttgaaacactctttttgtagaatctgcgaggggatatttggatagatttcaggatttccttggaaacgggaatatcttcatataaaatctcgacagaagcattctcataaacttctttgtgatgtgtgaactcagctaaccgaggtggatctttcttttgatagagcagttctgaaaaaaactttttgttgaatctgcaagtggacatttggatagatttgaagatttcgttgggaacgggaatatcttcatatcaaatctagacagaagcaatctcagaatcttccttgggatatatgcacgcagttaacagagttgaacctttctattgacagagcagttttgaaacagtctttccgtggaatctgcaagtggatatttggttagcttggaggatttcgttggaaacgggattacgtataaaaattagacagcagcatcctcagaaacttctttgtgatgtgtgcattcaagtcacagatttgaacatttcctttcgtacagcagctttgaaacactctttctgtagtatctggaagtgaacattaggacagctttcaggtctatggtgagaaaggaaatatcttcaaataaaaactagacagaatcattctcataaacttgtttgtgatgtgtgaactcagctaacagaggtggatctttcttttgatagagcagttctgaaaaacactttttgttgaatctgcaagtggacatttggatagatttgaagatttcgttggaaacgggaatatcttcatatcaaatctagacagaaagcattctcagaaacgtctttgcgatgtttgcattcaactcatagagttgaacattccctttgagtgagtagctttgaagcactctttttgtagcatgtgcaagtggacatttggagcgccctgaggcctacggggaaaaagcaaatatcttcccataaccactagacagaaacattctcagaaactcctttatgacctatgcactcacctaaaagagaagaaccttccttttgacagagcagttttgatacactctttttgtagaatctgcaagtgcatatttggatagctgtgaagatttcgttggaaacgggaatatcttcctataaaatctagacagaagcattctcagaaactgctctgtgatgtctgcattcaagtcacagagttgaacattgcctttcatttagcaggtttgaaacgctctttttgtagtatatggaagtggacgtttcggacggtttgaggcccatggtgataaaggcaatatcttcccctacaagctagaaagaagcattctgtgaaacttgtttgtgatgtgtgtactcaactaacagagttgaacctttctttttacagagcagttttgaaacactctttttgtagaatctgcgaggggatatttggatacatttcagcatttcgttggaaacgggaatatcttcatacaaaatctcgacagaagcattctcagaaacttccttgtgatatgtgcattcaagtcacagagttgaatattccctttcacagagtaggtttggaacactctttttgtagtatctggaagtggacatttggagcgccttgacgcccacggtgaaaagggaaatatcttcccataaaaactagacagaagcaatctcagaatcttctttgggatatatgcacgcagctaacagagttgaacttttctattgacagagcagttttgaaacagtctttctgtggaatctgcaagtggatatttggatagcttggaggatttcgtttgaaacgggattacgtataaaaagtagacagcagcatcctcagaaacttctttgtgatgtgtgcattcaagtcacagagttgaacattccctttcgtacagcagttttgaaacactctttctgtagtatctgaagtgaacaataggacagctttcaggtctatggtgagaaaggaaatatcttcaaataaaaactagacagaagcattctgataaacttgtttttgaagtgtgaactcagctaacagaggtggatctttcttttgatagagcagttctgaaaaacactttgttgaatctgcaagtggacatttggatagatttgaagatttcgttggaaacgggaatatcttcatatcaaatctagacagaagcattctcagaaacgtctttgtgatgattgcatttaactcatagagttgaacattccgtttcagagagcagctttgaaacactctttttgtagtatgtgcaagtggatatttggagcgctctgaggcctaaggtgaaaaagcaaatatcttcccataaccactagacagaaacattctcagaaacttatttatgacgtatgtactcaagtagcagagaagaactttccttttgacagagaactttggatacacactttttgtagtatctgcaagtggatatttggataggtgtgaagatttcgttggaaacgggaatatcttcatatcaaatctgacagaagcattctcagaaactgctctgtgatgtctgcattcaagtcacagagttgaacattgcttttcatagagcaggtttgaaacgctctttttgtagtatatggaagtagacgtttcggacggtttgaggcccatggtgataaacggaatatcttcccctacaagctagaaagaagcattctgtgaaacttgtttgtgatgtgtgtactcaactaacagagttgaacctttctttttacagagcagttttgaaacactctttttgtagaatctgcgaggggatatttggattgatttcaggatttcgttggaaacgggaatatcttcatataaaatctcgacagaagcattctcagaaacttctttgtgatatctgcattcaagtcacagagttgaatattccctttcacagagtaggtttgaaacactctttttgtagtatctggaagtggacatttggagagccttgacgcctacggtgaaaagggaaatatcttcccataaaaactagacagaagcaatctcagaatcttctttgtgatatatgcacgcagctaacagagttgaacctttctattgacagagcagttttgaaacagtctttctgtggaatctgcaagtggatatttggatagcttggaggatttcgttggaaacgggattacgtataaaaattagacagcagcatcctcagaaacttctttgtgatgtgtgcattcaagtcacagtgttgaacattccctttcgtacagcagttttgaaacactctttctgtagtatctggaagtgaacattaagacagctttcaggtctatggtgagaaaggaaatatcttcaaataaaaactagacagaagcattctcataaacttgtttgtgatgtgtgaactcagctaacagaggtggatctttcttttgatagagcagttctgaaaaacactttttgttgaatctgcaagtggacatttgaatagatttgaagatttcgttggaaacgggaatatcttcatatcaagtctagacagaagcattctcagaaacgtctttgtgatgttggcattcaaatcatagagttgaacattccgtttcagagagcagctttgaggcactctttttgtagtatgtgcaagtggatatttggagcgctctgaggcctacggtgaaaaagcaaatatcttcccataaccactagacagaaacattctcagaaacttctttatgacgtatgtactcaactaacagagaagaaccttccttttgacagagcagttttgatacactctttttggagaatctgcaagtggatatttggatatctgtgaagaattccttggaaacgcaaatatcttcctataaaatctaaacaaaaagcattctcagaaactgctctgtgatgtctgcattcaagtcacagagttgaacattgcctttcatagagcaggtttgaaaggctctttttgtagtatatggaagtggacgtttcggacggttggaggcccatggtgataaagggaatatcttcccctacaagctagaaagaagcattctgtgaaacttgtttgtgatgtgtgtactcaactaacagagttgaacctttctttttacagagcagttttgaaacactctttttgtataatctgcgaggggatatttggatagatttcaggatttcgttggaaacgggaatatcttcatataaaatctcgacagaagcattctcagaaacttccttgtgatatgtgcattcaagtcacagagttgaatattccctttcacagagtaggtttgaaacactctttttgtagtatctggaagtggacatttggagcgccttgaaacctacggtgaaaagggaaatatcttcccataaaaactagacagaagcaatctcagaatcttctttgggatatatgcacgcaactaacagagttgaacctttctattgacagagcagttttgaaacagtctttctgtggaatctgcaagtggatatttggatagcttgcaggatttctttggaaatgggattacgtataaaaagtagacagcaacatcctcagaaacttctttgtgatgtgtgcattcaactcacagagttgaacattccctttcgtacagcagttttgaaacactctttctgtagtaactggaagtgaacattaggacagctttcaggtctatggtgagaaaggaaatatcttcaaataaaaactagacagaagcattctcataaacttgtttgtgatgtgtgaactcagctaacagaggtggatctttcttttgatacagcagttttgaaaaacactttttgttgaatccgcaagtggacatttggatagatttgaagatttcgttggaaacgggaatatcttcatatcaaatctagacagaagcattctcagaaacgtctttgtgatgtttgcattcaactcatagagttgaacattccgtttcagagagcagctttgaggcactctttttgtagtatgtgcaagtggatatttggaccgctctgaggcctacggtgaaaaagcaaatatcttcccataaccactagacagaaacattctcagaaactcctttatgacgtgtgcactcacctaacagagaagaaccttccttttgacagagcagttttgatacactctttttgtagaatttgcaagtggatatttggatagctgtgaagatttcgttggaaacgggaatatcttcctataaaatctagacagaagcattctcagaaactgctctgtgatgtctgcattcaagtcacagagttgaacattgcctttcatagagcaggtttgaaacgctctttttgtagtatatgtaagtagacgtttcggacggtttgaggcccatggtgataaagggaatatcttcccctacaagctagaaagaagcattctgtgaaacttgtttgtgatgtgtgtactcaactaacagagttgaacctttctttttacaaagcagttttgaaacactctttttgtagaatctgcgaggggatatttggatagatttcaggatttcgttggaaacgggaatatcttcatataaaatctcgacagaagcattctcagaaacttctttgtgatatgcgcattcaagtcacagtgttgaatattccctttcacagagtaggtttgaaacactctttttgtagtatctggaagtggacatttggagcgccttgacacctatgatgaaaagggaaatatcttcccataaaaactagacagaagcaatctcagaatcttctttgggatatatgcacgcagctaacagagttgaacctttctattgacagagcagttttgaaacagtctttctgtggaatctgcaagtggatatttggatagcttggaggatttcgttggaaacgggattacatatacaaagtagacagcagcatcctcagaaacatccttgtgatgtgtgcattcaagtcacagagttgaacattccctttcgtacagcagttttgaaacactctttctgtagtatctggaagtgaactttagcacagctttcaggtctatggtgagaaaggaaatatcttcaaataaaaactagacagaagcattctcataaacttgtttgtgatgtgtgaactcagctaacagaggtggatctttcttttgatagagcagttctgaaaaacactttttgttgaatctgcaagtggacatttggatagatttgaagatttcgttggaaatgggaatatcttcatatcaaatctagacagaagcattctcagaaacgtctttgtgatgtttgcattcaactcatagagtttaacattccgtttcagagagcagctttgaagcactctttttgtagtatgtgcaagtggatatttggagcgctctgaggcctacggtgaaaaagcaaatatcttcccataaccactagacagaaacattctcagaaactcctttatgacgtatgtactcaactaacagagaagaaccttccttttgacagagcagatttgatacactctttttgtagaatctgcaagtggatatttggatagctgtgaagatttcgttggaaacgggaatatcttcctataaaatctagacagaagcattctcagaaactgctctgtgatgtctgcattcaagtcacagatttgaacattgcctttcatagagcaggtttgaaacgctctttttgtagtatatggaagtggacgtttcggacggtttgaggcccatggtgataaagggaatatcttcccctacaagctagaaagaagcattctgtgaaacttgtttgtgatgtgtgtacgcaactaacagagttgaacctttctttttacagagcagttttgaaacactctttttgtagaatctgcgaggggatatttggatacatttcagcatttcgttggaaacgggaatatcttcatataaaatctcgacagaagcattctcagaaacttctttgtgatatctgccttcaagtcacagagttgaatattccctttcacagagtaggtttgaaacactctttttgtagtatctggaagtggacatttggagcgccttgacgcctacggtgaaaagggaaatatcttcccataaaaaatagacagaaagcaatctcagaatcttctttgggatatatgcacgcagctaacagagttgaacctttctattgacagagcagttttgaaacagtctttctgtggaatctgcaagtggatatttggatagcttggaggatttcgttggaaacgggattacgtatcaaaagtagacagcagcatcctcagaaacttctttgtgatgtgtgcattcaagtcacagagttgaacattccctttcgtacagcagttttgaaacactctttctgtagtatctggaagtgaacattaggacagctttcaggcctatggtgagaaaggaaatatcttcaaataaaaactagacagaagcattctcataaacttgtttgtgatgtgtgtactcagctaacagacgtggatctttcttttgatagagcagttctgaaaaacactttttgttgaatctgcaagtggacatttggatagatttgaagatttcgttggaaacgggaatatcttcatatcaaatctagacagaagcattctcagaaacgcctttgtgatgtttgcattcaactcatagagttgaacattccctttctgagaggagctttgaagcactctttttgtagtatgtgcaagtggacatttggaccgctttgaggcctacggggaaaaagcaaatatcttcccataaccactagacaggaacattctcagaaacttctttatgacgtatgtactcaactagcagagaagaactttccttttgacagagcatttctgatacactctttttgtactatctgcaagtggatatttggatagctgtgaagatttcgttggaaacgggaatatcttcctataaagtctggacagaagcattctcagaaactgctctgtgatgtctgcattcaagtcacagagttgaacattgccgttcatagagcaggtttgaaacactctttttgtagtatatggaagtggacgtttcggacggtttgaggcccatggtgataaagggaatatcttcccatacaagctagaaagaagcattctgtgaaacttgtttgtgatgtgtgtactcaactaacagagttgaacctttctttttacagagcagttttgaaacactctttttgtagaatctgcgaggggatatttggatagatttcaggatttcgttggaaacgggaatgtcttcatataaaatctcgacagaagcattctcagaagcttctttgtgatatgtgcattcaagtcacagagttcaatattccctttcacagagtaggtttgaaacactctttttgtagtatctggaagtggacatttggagcgccttgacgcctacggtgaaaagggtaatatcttctcataaaaagtagacagaagcaatctcagaatcttctttgggatatatgcacgcagctaacagagttgaacctttctattgacagagcagttttgtaacagtctttctgtggaatctgcaagtggatatttggatagcttggaggattacgttggaaacgggattacgtataaaaagtagacagcagcatcctcagaaacatccttgtgatgtgtgcattcaagtcacagagttgaacattccctttcgtacagcagttttcaaacactctttctgtagtatctggaagtgaactttaggacagctttcaggtctatagtgagaaaggatatatcttcaaataaaaactagacagaagcattctcataaacttgtttgtgatgtgtgaactcaggtaacagacgtggatctttcttttgatacagcagttttgaaaaacactttttgttgaatctgcaagtggacatttggatagatttgaagatttcgttggaaacgggaatatcttcatatcaaatctagacagaagcattctcagaaacgtctttgtgatgtttccattcaactcatagagttgaacattccctttcagagagcagctttgaagcactctttttgtagtatgtgcaagtggatatttggagcgctctgaggcctacggtgaaaaagcaaatatcttcccataaccactagacagaaacattctcagaaactcctttatgacgtatgcactcacctaacagaggagaaccttcctttcgacagagcagttttgatacactctttttgtagaatctgcaagtggatattgggatagctgtgaagatttcgttggaaacgggaatatcttcctataaaatctagacagaagcattctcagaaacagctctgtgatgtctgcattcaagtcacagagttgaacattgcctttcatagagcaggtttgaaacgctctttttgtagtatatggaagtggacgtttcggacggtttgaggcccatggtgataaagggaatatcttcccctacaagctagaaagaagcattctgtgaaagttgtttgtgatgtgtgtactcaactaacagagttgaacctttctttttacagagcagttttgaaacactctttttgtagaatctgcgaggggatatttggatagatttcaggatttcattggaaacgggaatatcttcatataaaatctcgacagaagcattctcagaaacttctttgtgatatctgctttcaagtcacagagttgaatattccctttcacagagtaggtttgaaacactctttctgtagtatctggaagtggacatttggagcgccttgacacctacggtgaaaagggaaatatcttcccataaaaactagacagaagcaatctcagaatcttctttgggatatatgcacgcagctaacggagttgaacatttctattgacagagcagttttgaaacagtcgttctgtggaatctgcaagtggatatttggatagcttggaggatttcgttggaaacgggattacgtataaaaagtagacagcagcatcctcagaaacttctttgtgatgtgtgcattcaagtcacagagttgaacattccctttcgtacagcagttttgacacactctttctgtagcatctggaagtgaacattaggacagctttcaggtctatggtgagaaaggaaatatcttcaaataaaaactagacagaagcattctcataaacttgtttgtgatgtgtgaactcagctaacagaggtggatctttcttttgatagagcagttctgaaaaacactttttgttgaatctgcaagtggacattaggatagatttgaagatttcgttggaaacgggaatatcttcatatcaaatctagacagaagcattctcagaaacgtctttgtcatgtttgcattcaactcatagagttgaacattccctttcagagagcagctttgaaacactctttttgtagtatgtgcaagtggatatttggagcgctctgaggcctacggtgaaaaagcaaatatcttcccataaccacgagacagaaacattctcagaaactcctttatgacgtatgtactcaactaacagagaagaaccttccttttgacagagcagttttgatacactctttttgtagaatctgcaagtggatatttggatagctgtgaagatttcgttggaaacgggaataccttcctataaaatctagacagaagcattctcagaaactgctctgtgatgtctgcattcaagtcacagagttgaacattgcctttcatagagcaggtttgaaacgctctttttgtaatatatggaagtggacttttcggacggtttgaggcccatggtgataaagggagtatcttcccctacaagctagaaagaagcattctgtgaaacttgtttgtgatgtgtgtactcaactaacagagttgaaccttcctttttacagagcagttttgaaacactctttttgtagaatctgcgaggggatatttggatagatttcaggatttcgttggaaacgggaatatcttcatatagaaatctcgacagaagcattctcagaaacttctttgtgatatgtgcattcaagtcacagagatgaatattccctttcacagagtaggtttgaaacactctttttgtactatctggaagtggacatttggagcgccttgacgcctacggtgaaaagggaaatatcttcccataaaaactagacagaagcaatctcagaatcttctttgggatatatgcacgcagctaacagagttgaacctttctattgacagagcagttttgaaacagtctttctgtggaatctgcaaatggatatttggatagcttggaggatttcgttggaaacgggattacgtataaaaagtagacagcagcatcctcaggaaccttctttgtgatgtgtgcattcaagtcacagagttgaacattccctttcgtacagcagttttgaaacactctttctgtagtaactggaagtgaacattaggacagctttcaggtctatggtgagaaaggaaatatcttcaaataaaaactagacagaagcattctcataaacttgtttgtgatgtgtgaactcagctaacagaggtggatctttcttttgatagagcagttctgaaaaacactttttgttgaatctgcaagtggacatttggatagatttgaagatttcggtggaaacgggaatatcttcatatcaaatctagacagaagcattcttggaaacgtctttgtgatgtttgcattcaactcatagagttgaacattccctttcagagagcagctttgaagcactctttttgtagtatgtgcaagtggatatttggagcgctctgaggcctacggtgaaaaagcaaatatcttcccataaccactacacagaaacattctcagaaactcctttatgacgtatgcactcacctaacagagaagaaccttccttttgacagagcagttttgatacactctttttgtagaatctacaagtggatatttggatagctgtgaagatttcgttggaaacgggaatatcttcctataaaatctagacagaagcattctcagaaactgctctgtgatgtctgcattcaagtcacagagctgaacattgcctttcatagagcaggtttgaaacgctctttttgtagtatatgtaagtggacgtttcggacggtttgaggcccatggtgataaagggaatatcttcccctacaagctagaaagaagcattctgtgaaacttgtttgtgatgtgtgtactcaactaacagagttgaacctttctttttacagagcagttttgaaacactctttttgtagaatctgcgaggggatatttggatagatttcatgatttcgtttgaaacgggaatatcttcatataaaatctcgacagaagcattctcagaaacttctttgtgatatgtgcattcaagtcacagagttgaatattccctttcacagagtaggtttgaaacactctttttgtagtatctggaagtggacatttggagcgccttgacacctacggtgaaaagggaaatatcttcccataaaactagacagaagcaatctcagaatcttctttgggatatatgcacgcaggtaacagagttgaacctttctattgacagagcagttttgaaacagtctttctgtggaatctgcaagtggatatttggatagcttggaggatttcgttggaaacgggattacgtataaaaagtagacagcagcatcctcagaaacttctttgtgatgtgtgcattcaagtcacagagttgaacattccctttcgtacagcagttttgaaacactctttctgtagtatctggaagtgaacattacgacagctttcaggtctatggtgagaaaggaaatatcttcaaataaaaactagacagaagcattctcataaacttgtttgtgatgtgtgaactcagctaacagaggtggatctttcttttgatagagcagttctgaaaaacactttttgttgaatctgcaagtggacatttggatagatttcaagatttcgttggaaacgggaatatcttcatatcaaatctagacggaagcattctcagaaacgtctttgtgatgtttgcattcaactcatagagttgaacattccgtttcagagagcagctttgaggcactctttttgtactatgtgcaagtggatatttggagcgctctgaggcctacggtgaaaaagcaaatatcttcccataaccactagacagaaacattctcagaaactcctttatgacgtatgtactcaactaacagagaagaaccttccttttgacagagcagttttgatacactctttttgtagaatctgcaagtggatatttggatagctgtgaagatttcgttggaaacgggaatacattcctataaaatctagacagaagcattctcagaaactgctctgtgatgtctgcattcaagtcacagagttgaacattgcctttcctagagcaggtttgaaacgctctttttgtagtatatggaagtggacgtttcggacggtttgaggcccatggtgataaagggaatatcttcccctacaagctagaaagaaagcattctgtgaaacttgtttgtgatgtgtgtactcaactaatagagttgaacctttctttttacagagcagttttgaaacactctttttgtagaatctgcgaggggatatttggatagatttcaggatttcgttggaaacgggaatatcttcatagaaaatctcgacagaagcattctcagaagcttctttgtgatatgtgcattcaagtcacagagttgaatattccctttcacagagtaggtttgaaacactctttttgtagtatctggaagtggacatttggagcgccttgacgcctacggtgaaaagggaaatatcttctcataaaaagtagacacaagcaatctcagaatcttctttgggatatatgcacgcagctaacagagttgaacctttctattgacagagcagttttgaaacagtctttctgtggaatctgcaagtggatatttggatagcttggaggatttcgttggaaacgggattacgtataaaaagtacacagcagcatcctcagaaacttctttgtgatgtgtgcattcaagtcacagaattgaacattccctttcgtacagcagttttgaaacactctttctgtagtatctggaagtgaactttaggagagctttcaggtctatagtgagaaaggaaatatcttcaaataaaaactagacagaagcattctcctaaacttgtttgtgatgtgtgaactcagctaacagacgtggatctttcttttgatacagcagttttgaaaaacactttttgttgaatctgcaagtggacatttggatagatttgaagatttcgttggaaacgggaatatcttcatatcaaatctagacagaagcattctcagaaacgtctttgtgatgtttacattcaactcatagagttgaacattccctttcagagagcagctttgaagcactctttttgtagcatgtgcaagtggacatttggagcgctctgaggtctacggggaaaaagcaaatatcttcccataaccactagacagaaacattctcagaaactcctttatgacgtatgcactcacctaacagaaaagaaccttccttttgacagagcagttttgatacactctttttgtagaatctgcaagtggatatttggatagctgtgaagatttcgttggaaacgggaatatcttcctataaaatctcgacagaagcattctcagaaactgctctgtgatgtctgcattcaactcacagagttgaacattgcctttcatagagcaggtttgaaacgctctttttgtagtatatggaagtggacgtttcggacggtttgaggcccatggtgataaagggaatatcttcccctacaagctagaaagaaagcattctgtgaaacttgtttgtgatgtgtgtactcaactaacagagttgaacctttctttttacagagcagttttgaaacactctttttgtagaatctgcgaggggatatttggatacatttcagcatttcgttggaaacgggaatatcttcatataaaatctcgacagaagcattctcagaaacttctttgtgatatctgcattcaagtcacagagttgaatattccctttcacagagtaggtttgaaacactctttttgtagtatctggaagtggacatttggagcgccttgacacctacggtgaaaaggcaaatatcttcccataaaaactagacagaagcaatctcagaatcttctttgggatatatgcacgcagctaacagagttgaacctttctactgacagagcagttctgaaacagtctttctgtggaatatgcaagtggatatttggatagcttggaggatttcgttggaaacgggattacgtataaaaagtagacagcagcatcctcagaaacttctttgtgatgtgtgcattcaagtcacagagttgaacattccctttcgtacaacagttttgaaacactctttctgtagtatctggaagtgaacattaggacagctttcaggtctatggtgagaaaggaaatatcttcaaataaaaactagacagaagcattctcataaacttgtttgtgatgtgtgaactcagctaacagaggtggatctttcttttgatagagcagttctgaaaaacactttttgttgaatctgcaagtggacatttggatagattagaagatttcgttggaaacgggaatatcttcatatcaaatctagacagaagcattctcagaaacgtctttgcgatgtttgcattcaactcatagagttgaacattccgtttcagagagcagctttgaggcactctttttgtagtatgtgcaagtggatatttggagccctctgaggcctacggtgaaaaagcaaatatcttcccataaccactagacagaaacattctcagaaactcctttgtgacgtatgcactcacctaacagaaaagaaccttccttttcacagagcagttttgatacactctttttgtagaatctgcaagtggatatttggatagctgtgaagatttcgttggaaacgggaatatcttcctataaaatctagacagaagcattctcagaaactgctctgtgatgtctgcattcaagtcacagagttgaacattgcctttcctagagcagggttgaaatgctctttttgtagtatatggaagtggacgtttcggacggtttgaggcccatggtgataaagggaatatcttcccctacaagctagaaagaagcattctgtgaaacttgtttgtgatgtgtgtactcaactaacagagttgaacctttctttttacagagcagttttgaaacactctttttgtagaatctgcgaggggatatttggatacatttcaggatttcgttggaaacgggaatatcttcatataaaatcccgacagaagcattctcagaagcttctttgtgatatgtgcattcaagtcacagagttgaatattccctttcacagagtaggtttgaaacactctttttgtagtatctggaagtggacatttggagcgccttgacgcctacgttgaaaagggaaatatcttctcataaaaagtagacagcagcaatctcagaatcttctttgggatatatgcacgcagctaacagagttgaacctttctattgacagagcagttttgaaacagtctttctgtggaatctgcaagtggatatttggatagcttggacgatttcgttggaaacgggattacgtataaaaagtagacagcagcctcctcagaaacttctttgtgatgtgtgcattcaagtcacagagttgaacattccctttcgtacagcagttttgaaacactctttctgtagtatctggaagtgaacattaggacagctttcaggtctatggtgagaaaggaaatatcttcaaataaaaactagacagaagcattctcataaacttgtttgtgatgtgtgaactcagctaacagacgtggatctttcttttgatacagcagttttgaaaaacactttttgatgaatctgcaagtggacatttggatagatttgaagatttcgttggaaacgggaatatcttcatatcaaatctagacagaagcattctcagaaacgtctttgggatgtttgcattcaactcatacagttgaacattccgtttcagagagcagctttgaagcactctttttgtagtatgtgcaagtggatatttggagcgctctgaggcctacggtgaaaaagcaaatatcttcccataaccactagacagaaacattctcagaaactcctttatcacgtatgcactcacccaacagagaagaaccttccttttgacagagcagttttgatacactctttttgtagaatctgcaagtggatatttggatagctgtgaagatttcgttggaaacgggaatatcttcctataaaatctagacagaagcattctcagaaactgctctgtgatgtctgcattcaagtcacagagttgaacattgcctttcctagagcaggtttgaaacgctctttttgtagtatatggaagtggacgtttcggacggtttgaggcccatggtgataaagggaatatcttaccctacaagctagaaagaagcattctgtgaaacttgtttgtgatgtgtgtactcaactaacagagttcaacctttctttttacagagcagttttgaaacactctttctgtagaatctgcgaggggatatttggatagatttcaggatttcgttggaaacgggaatatcttcatataaaatctcgacagaagcattctcagaaacttctttgtgatatgtgcattcaagtcacagagttgaatattccctttcacagagtaggtttgaaacactccttttgtagtatctggaagtggacatttggagcgccttgacgcctacggtgaaaagggaaatatcttcccataaaaactagacagaagcaatctcagaatcttctttgtgatatatgcacccagctaacagagttgaacctttctattgacagagcagttttgaaacagtctttctgtggaatctgcaagtggatatttggatagcttggaggatttcgttggaaacgggattacgtataaaaagtagacagcagcatcctcagaaacttctttgtgatgtgtgcattcaagtcacagagttgaacattccctttcgtacagcagtgttgaaacactctttctgtagtatctggaagtgaacattaggacagctttcaggtctatggtgagaaaggaaatatcttcaaataaaaactagacagaagcattctgataaacttgtttgtgaagtgtgaactcagctaacagaggtggatctttcttttgatagagcagttctgaaaaacactttgttgaatctgcaagtggacatttggatagatttgaagatttcgttggaaacgggaatatcttcatatcaaatctagacagaagcattctcagaaacgtctttgtgatgtttgcattcaactcatagagttgaacattccctttcagagagcagctttgaagcactctttttgtagtatgtgcaagtggatatttggagaactctgaggcctacggtgaaaaagcaaatatcttcccataaccactagacagaaacattctcagaaactcctttatgacgtatgtactcaactaacagagaagaaccttctttttgactgagcagttttgatacactctttttgtagaatctgcaagtgcatatttggatagctgtgaagatttcgttggaaacgggaatatcttcctataaaatctagacagaagcattctcagaaactgctctgtgatgtctgcattcaagtcacagagttgaatattccctttcacagagtaggtttgaaacactctttttgtagtatctggaagtggacatttggagcgccttgacgcctacggtgaaaagggaaatatcttcccataaaaactagacagaagcattctgtgaaacttgtttgtgatgtgtgtactcaactaacagagttgaacctttctttttacagagcagttttgaaacactcttttcgtagaatctgcgaggggatatttggatagatttcaggatttcgttggaaacgggaatatcttcatataaaatctcgacagaagcattctctgaaacttctttgtgatatgtgcattcaagtcacagagttgaatattccctttcacagagtaggtttgaaacactctttttgtagtatctggaagtggacatttggagcgccttgacgcctacggtgaaaagggaaatatcttctcataaaaagtagacagaagcaatctcagaatcttctttggtatatatgcacgcagctaacagagttgaacctttctattgacagagcagttttgaaacagtctttctgtggaatctgcaagtggatatttggatagcttggaggatttcgttggaaacgggattacgtataaaaagtagacagcagcatcctcagaaacttctttgtgatgtgtgcattcaagtcacagagttgaacattccctttcgtacagcagttttgaaacactctttctgtagtatctggaagtgaacattatgacagctttcaggtctatggtgagaaaggaaatatcttcaaataaaaactagacagaagcattctcataaacttgtttgtgatgtctgaactcagctaacaggtggatctttcttttgatagagcagttctgaaaaacactttttgttgaatctgcaagtggacatttggatagatttgaagatttcgttggaaacgggaatatcttcatatcaaatctagacagaagcattcccagaaacgtctttgtgatgtttgcattcaactcatagagttgaacattccctttcagagagcagctttgaagcactctttttgtagtatgtgcaaggggatatttggagtgctctgaggcctacggtgaaaaagcaaatatcttcccataaccactagacagaaacattctcagaaactcctttatgacgtatgcactcacctaacagagaagaaccttccttttgacagtgcagttttgatacactctttttgtagaatctgcaagtggatatttggatagctgtgaagatttcgttggaaacgggaatatcttcctataaaatctagacagaagcattctcagaaactgctctgtgatgtctgcattcaactcacagagttgaacattgcctttcatagagcaggtttgaaacactctttttgtagtatatggaagtggacgtttcggacggtttgaggcccatggtgataaagggaatatcttcccctacaagctagaaagaagcattctgtgaaacttgtttgttatgtgtgtactcaactaacagagttgaacctttcttttcacagagcagttttgaaacactctttttgtagaatctgcgaggggatatttggatagatttcaggatttcgttggaaacgggaatatcttcatataaaatctcgacagaagcattctcagaaacgtctttgtgatatgtatattcaagtcacagagttgaatattccctttcacagagtaggtttgaaacactctttttgtagtatctggaaggggacatttggagcaccttgacgcctacggtgaaaagggaaatatcttcccataaaaactagacagaagcaatctcagaatcttctttgggatatatgcacgcagctaacagagttgaacctttctattgacagagcagttttgaaacagtctttctgtggaatctgcaagtggatatttggatagattagaggatttcgttggaaacgggattacgtataaaaagtagacagcagcatcctcagaaacttctttgtgatgtgtgcattcaagtcacagagttgaacattccctttcgtacagcagttttgaaacactctttctgtagtatctggaagtgagcattaggagagctttcaggtctatggtgagaaaggatatatcttcaaataaaaactagacagaagtattctgataaacttgtttgtgaagtgtgaactcagctaacagaggtggatctttctttcgaaacagcagtttcgaaaaacactttttgttgaatctgcaagtggacatttgaatagatttgaagatttcgttggaaatgggaatatcttcatatcaaatctagacagaaagcattctcagaaacgtctttgtcatgtttgcattcaactcatagagttgaacattccctttcagagagcagctttgaaacactctttttgtagtatgtgcaagtggatatttggagcgctctgaggcctaaggtgaaaaagcaaatatcttcccataaccactagacagaaacattctcagaaactcctttaaacgtatgcactcacctaacagagaagaaccttccttttgacagagcagttttgatacactctttttgtagaatctgcaagtggatatttggatagctgtgaagatttcgttggaaacgggaatatcttcctataaaatctagacagaagcattctcagaaactgctctgtgatgtctgcattcaagtcacagaagttgaacattgcctttcatagagcaggtttgaaacgctctttttgtagtatatggaagtggacgtttcggacggttggaggcccacggtgataaagggaatatcttcccctacaagctagaaagaagcattctgtgaaacttgtttgtgatgtgtgtactcaactaatagagttgaacctttctttttacagagcagttttgaaacactctttttgtagaatctgcgaggggatatttggatagatttcaggatttcgttggaaacgggaatatcttcatataaaatactcgacagaagcattagcagaaacttctttgtgatatgtgcattcaagtcacagagttgaatattccctttcacagagtaggtttgaaacactctttttttagtatctggaagtggacatttggagcgccttgacgcctatggtgaaaagggaaatatcttcccataaaaactagacagaagcaatctcagaatcttctttgtgatatatgcacgcagctaacagagtttaacctttctattgacagagcagttttgaaacagtctttctgtggaatctgcaagtggatatttggatagattggaggatttcgttggaaacgggattacgtataaaaagtagacagcagcatcctcagaatcttccttgtgacgtgtgcattcaagtcacagagttgaacattccctttcgtacagcagttttgaaaaactctttctgtagtatctggaagtgaactttaggagagctttcaggtctatagtgagaaaggatatatcttcaaataaaaactagacagaagaattctgataaacttgtttgtgaagtgtgaactcagctaacacaggtggatctttcttttgatacagcagttttgaaaaacactttgttgaatctgcaagtggacatttggatagatttgaagatttcgttggaaacgggaatatcttcatatcaaatctagacagaagcattctcagaaacgtctttgtgatgtttgcattcaactcatagagttgaacattccctttcagagagcagctttgaagcactctttttgtagtatgttcaagtggacatttggagcgctttgaggcatacggggaaaaagcaaatatcttcccataaccactagacagaaacattctcagaaactcctttatgacgtatgcactcacctaacagagaagaaccttccttttgacagagcagttttgatacactctttttgtagaatctgcaagtggatatttggatagctgtgaagatttcgttggaaatgggaatatcttcctataaaatctagacagaagcattctcagaaactgctctgtgatgtctgcattcaagtcacagagttgaacattgcctttcatagagcaggtttgaaacgctctttttgtaatatatggcagtggacgtttcggacggtttgaggaccatggtgataaagggaatatcttcccctacaagctagaaagaagcattctgtgaaacttgtttgtgatgtgtgtactcaactaacagagttgtacctttcttttcacagagcagttttgaaacactctttttgtagaatctgcgaggggatatttggatagatttcaggatttcgttggaaacgggaatatcttcatataaaatctcgacagaagcattctcagaaacttctttgtgatatctgcattccagtcacagagttgaatattccctttcacagagtaggtttgaaacactctttttgcagtatctggaagtggacatttggagcgccttgacgcctacggtgaaaagggaaatatcttcccataaaaactagacagaagcaatctccgaatcttctttgggatatatgcacgcagctaacagagttgaacctttctattgacagagcagttttgaaacagtctttctgtggaatctgcaagtggatatttggatagcttggaggatttcgttggaaaagggattatgtataaaaagtagacagcagcatcctcagaaacttctttgtgatgtgtgcattcaagtcacagagttgaacattccctttcgtacagcagttttgaaacattctttctgtagtatctggaagtgaacattaggacagctttcaggtctatggtgagaaaggaaatatcttcaaataaaaactagacagaagcattctcataaacttgtttgtgatgtctgaactcagctaacagacgtggatctttcttttgatacagcagttttgaaaaacactttttgttgaatctgcaagtggacatttggatagatttgaagatttcgttggaaacgggaatatcttcatatgaaatctagacagaagcattctcagaaacgtctttgtgatgtttgcattcaactcatagagttgaacattccctttgagagagcagctttgaagcactctttttgtagcatgtgcatgtggacatttggagcgccctgaggcctatggggaaaaagcaaatatcttcccataaccactagacagaaacattctgagaaactcctttatgacgtatgcactcacctaaccgagaagaaccttccttttgacagagcatttttgatacactctttttgtagaatctgcaagtggatatttggatagctgtgaagatttcgttggaaacgggaatatcttcctataaaatctagacagaagcattctcagaaactgctctgtgatgtctgcattcaagtcacagagttgaacattgcctttcatagagcaggtttgaaacgctctttttgtagtatatgtaagtggacgtttcggacagtttgaggcccatggtgataaagggaatatcttcccctacaagctagaaagaagcattctgtgaaacttgtttgtgatgtgtgtactcaactaacagagttgaacctttctttttacagaggagttttgaaacactctttttgtagaatctgcgaggggatatttggatagatttcaggatttcgttggaaacgggaatatcttcatataaaatctcgacagaagcattctcagaaacttctttgtgatatgtgcattcaagtcacagagttgaatattccctttcgcagtgtaggtttgaaacactctttttgtagtatctggaagtggacatttggagcgccttgacgcctacggtgaaaagggaaatatcttcccataaaaactagacagaagcaatctcagaatcttctttgggatatatgcacgcagctaacagagttgaacctttctactgacagagcagttttgaaacagtctttctgtggaatctgcaagtggatatttggatagcttggaggatttcgttggaaacgggattacgtataaaaagtagacagcagcattctcagaaacttctttgtgatgtgtgcattcaagtcacagagttgaacattcccttttgtagaacaggtttgaaacactctttctgtagtatctggaagtgaacatttcgagagctttcaggcctatggtgagaaaggaaatatcttcaaataaaaactagacagaagcattctcataaacttgtttgtgatgtgtgaactcagctaacagaggtggatctttcgatagagcagttctgaaaaacactttttgttgaatctgcaagtggacatttggatagatttgaagatttcgttggaaacgggaatatcttcatatcaaatctagacagaagcattctcagaaacgtctttgcgatgtttgcattcaactcatagagttgaacattccgtttcagagagcagctttgaagcactctttttgtagtatgtgcaagtggatatttggagcgctctgaggcctacggtgaaaaagcaaatatcttcccataaccactagacagaaacattctcagaaactcctttatgacgtatgccctcacctaacagagaataaccttccttttgacagagcatttttgatacactctttttgtagcatctgcaagtggatatttggatagctgtgaagatttcgttggaaacgggaatatcttcctataaaatctagacagaagcattctcagaaactgatctgtgatgtctgcattcaagtcacagagttgaacattgcctttcgtagagcaggtttgaaacgctctttttgtagtatatggaagtagacgtttcggacggtttgaggcccatggtgataaagggaatatcttcccctgcaagctagaaagaagcattctgtgaaacttgtttgtgatgtgtgtactcaactaacagagttgaacctttctttttacagagcagttttgaaacactctttttgtagaatctgtgaggggatatttggatagatttgaggatttcgttggaaacgggaatatcttcatataaaatctcgacagaagcattctcagaaacttctttgtgatatgtgtattcaagtcacagagttgaatactccctttcacagagtaggtttgaaaaactctttttgtagtatctggaagtggacatttggagcgccttgacgcctacggtgaaaagggaaatatcttcccataaaaactagacagaagcaatctcagaattttctttgggatatatgcacacagctaacagagttgaacttttctattgacatagcagttttgaaacagtctttctgtggaatctgcaagtggatatttggatagcttggaggatttcgttggaaacgggattacgtataaaaagtagacagcagcatcctcagaaacttttttgtgatgtgtgcattcaagtcacagagttgaacattccctttagtacagcagttttgaaacactctttctgtagtatctggaagtgaacattaggacagctttcaggtctatggtgagaaaggaaatatcttcaaataaaaactagacagaagcattgtcataaacttgtttgtgatgtgtgaactcagctaacagaggtggatctttcttttgatagagcagttctgaaaaacacgttttgttgaatctgcaagtggacatttggatagatttgaagatttcgttggaaacgggaatatcgtcatatcaaatctagacagaagcattctcagaaacgtctttgcgatgtttgcattcaactcatagagttgaacattccgtttcagagagcagctttgaggcactctttttgtagtatgtgcaagtggatatttggagtgctctgaggcctacggtgaaaaagcaaatatcttcccataaccactagacagaatcattctcagaaactcctttatgacgtatgcactcacctaacagagaagaaccttccttttgacagagcagttttgatacactctttttgtagaatctgcaagtggatattgggatagctgtgaagatttcgttggaaacgggaatatcttcatataaaatctcgacagaagcattctcagaaactgctctgtgatgtctgcattcaagtcacagagttgaacattgcctttcatagagcaggtttgaaaccctctttttgtagtatatggaagtggacttatcggacggtttgaggcccatggtgataaagggaatatcttcccctacaagctagaaagaagcattctgtgaaacttgtttgtgaggtgtgtactcaactaacagagttgaacctttctttttacagagcagttttgaaacagtctttttgtagaatctgcgaggggatatttggatagatttcaggatttcgttggaaacgggaatatcttcatataaaatctcgacagaagcattctcagaaacttctttgtgatatctgcattcaagtaacagagttgaatattccctttcacatagtaggtttgaaacactctttttgtagtatctggaagtggacatttggagctctgtgacgcctatggtgaaaaggaaaatatcttcccataaaaactagacagaagcaatctcagaatcttctttgggatatatgcacgcagctaacagagttgaaccttactattgacagagcagttttgaaacagtctttctgtggaatctgcaagtggatatttggatagcttggaggatttcgttggaaacgggattacgcataaaaagtagacagcagcatcctcagaaacttctttgtgatgtgtgcattcaagtcacagagttgaacattccctttcgtacagcagttttgaaacactctttctgtagtatctggaagtgaacattaggacagctttcaggtctagggtgagaaaggaaataccttcaaataaaaactagacagaagcattctcataaacttgtttgtgatgtctgaactcagctaacagaggtggatctttcttttgatagagcagttctgaaaaacacttttttttgaatctgcaagtggacatttggatagatttgaagatttcgttggaaacgggaatatcttcatatcaaatctagacagaagcattctcagaaacagtctttgtgatgtttgcattcaactcatagagttgaacattccgtttcagagagcagctttgaagcactctttttgtagtatgtgcaagtggatatttggagcgctctgaggcctacggtgaaaaagcaaatatcttcccataaccactagacagaaacattctcagaaactcctttatgaagtatgtactcaactaacagagaagaaccttccttttgacagagcagttttgatacactctttttgtagaatctgcaagtggatatttggatagctatgaagatttcgttggaaacgggaatatcttcctataaaatctagacagaagcattctcagaaactgctctgtgatgtctgcattcaagtcacagagttgaacattggttttcctagagcaggtttgaaacgctctttttgtagtatatggaagtggacgtttcggacgttttgaggcccatggtgataaagggaatatcttcccctacaagctagaaagaagcattctgtgaaacttgtttgtgatgtgtgtactcaactaacagggttcaacctttctttttacagagcagttttgaaacaatctttttgtagaatctgcgaggggatatttggatagatttcaggatttcgttggaaacgggaatatcttcatagaaaatctcgacagaagcattctcagaaacttctttgtgatatgtgcattcaagtcacagagttgaatattccctttcacagagtaggtttgaaacactctttttatagtatctggaagtggacatttggagcgccttgacacctacggtgaaaagggaaatatcttcccataaaaactagacagaagcaatctcagaatcttctttgggatatatgcatgcagctaacagagttgaacctttctattgacagagcagttttgaaacagtctttctgtggaatctgcaagtggatatttggatagctgggaggatttcgttggaaacgggattacgtataaaaagtagacagcagcatcctcagaaacttctttgtgatgtgtgcattcaagtcacagagttgaacattccctttcgtacagcagttttgaaacactctttctgtagtatctgcaagtgtacattaggacagctttcaggtctatggtgagaaaggaaatatcttcatatgaaaactagacagaagcattctcataaacttgtttgtgatgtgtgaactcagctaacaacggtggatctttcttttgatagagcagttctgaaaaacactttttgttgaatctgcaagtggacatttggatagttttgaagatttccttggaaacgggaatatcttcatatcaaatctagacagaagcattctcagaaacgtctttgcgatgtttgcattcaactcatagagttgaacattccgtttcagagagcagctttgaggcactctttttgtagtatgtgcaagtggatatttggagcgctctgaggcctacggtgaaaaagcaaatatcttcccataaccactaacagaaacattctcagaaactcctttatgacgtatgcactcacctaacagaaaagaaccttccttttgacagagcagtttcgatacactctttttgtagaatctgcaagtggatatttggatagctgtgaagatttcgttggaaacgggaatatcttcctataaaatctagacagaagcattcccagaaactgctctgtgatgtctgcattcaagtcacagagttgaacattgcctttcatagagcaggtttgaaacgctctttttgtagtatatggaagtggacttatcggacggtttgaggcccatggtgataaagggaatatcttcccctacatgctagaaagaagcattctgtgaaacttgtttgtgatgtgtgtactcaactaacagagttgaacctttcttttcacagagcagttttgaaacactctttttgtagaatctgcgaggggatatttggatagatttcagcatttcgttggaaacgggaatatcttcatataaaatactcgacagaagcattctcagaaactactttgtgatatgtgcattcaagtcacagagttgaatattccctttcacagagtaggtttgaaacactctttttgtagtatctggaagtggacatttggagcgccttgacacctacggtgaaaagggaaatatcttcccataaaaactagacagaagcaatctcagaatcttctttgggatatatgcacgcagctaacagagttgaacctttctattgacagagcagttttgaaacagtctttctgtggaatctgcaagtggatatttggatagcttggaggatttcgttggaaacgggattacgtataataagtagacagcagtatcctcagaaacttctttgtgatgtgtgcattcaagtcacagagttgaacattccctttcgtacagcagttttgaaacactctttctgtagtatctggaagtgaacattaggacagctttcagctctatggtgagaaacaaaatatcttcaaataaaaactagacagaagcattctcataaacttgtttgtgatgtgtgaactcagctaagagacgtggatctttcttttgatagagctgttctgaaaaacacgttttgttgaatctgcaagtggacatttggatagatttgaagatttcgttggaaacgggaatatcttcatatcaaatctagacagaagcattctcggaaacgtctttgtcatgtttgcattcaactcatagagttgaacattccgtttcagagagcagctttgaagcactctttttgtagtatgtgcaaggggatatttggagcgctctgaggcctaaggtgaaaaagcaaatatcttcccataaccactaaacagaaacattctcagaaactcctttatgacgtatgcactcacctaacagagaagaaccttccttctgacagagcagttttgatacactctttttgtagaatctgcaagtggatatttggatagctgtgaagatttcgttggaaacgggaatatcttcctataaaatctagacagaagcattctcagtaaactgctctgtgatgtctgcattcaagtcacagagttgaacattgcctttcatagagcaggtttgaaacgctctttttgtagtatatggaagtggatgtttcggacggttggaggcccatggtgataaagggaatatcttcccctacaagctagaaagaagcattctgtgaaacttgtttgtgaggtgtgtactcaactaacagagttgaacctttctttttacagagcagttttgaaacactgtttttgtagaatctgcgaggggatatttggatagatttcaggatttcgttggaaacgggaatatcttcatataaaatctcgacagaagcattctcagaaacttctttgtgacatgtgcattcaagtcacagagttgaatattccctttcacagagtaggtttgaaacactctttttgtagtatctggaagtggacatttggagcgcctcgacgcctacggtgaaaagggaaatatcttcccataaaaactagacagaagcagtctcagaatcttctttgggatatatggacacagctaacagagttgaacttttctattgacagagcagttttgaaacagtctttctgtggaatctgcaagtggatatttggatagcttggaggatttcgttggaaacgggattacgtataaaaagtagacagcagcatcctcagaaacttctttgtgatgtgtgcattcaagtcacagagttgaacattccctttcgtacagcagttttcaaacactctttctgtagtatctggaagtgaacattaggacagctttcagctctatggtgagaaaggaaatatcttcaaataaaaactagagagaagcattctcataaacttgtttgtgatgtgtgaactcagctaacagaggtggatctttcttttgatagagcagttctgaaaaacactttttgttgaatctgcaagtggacatttggatagatttgaagatttctttggaaacgggaatatcttcatatcaaatctagacagaagcattctcagaaacgtctttgcgatgtttgcattcaactcatagagttgaacattccgtttcagagagcagctttgaggcactctttttgtagtatgtgcaagtggatatttgaagcgctctgaggcctacggtgaaaaagcaaatatcttcccataaccactaacagaaacattctcagaaactcctttatgacgtatgtactcaactaacagagaagaaccttccttttgacagagcagttttgatagactctttttgtagaatctgcaagtggatatttggatagctgtgaagatttcgttggaaactggaatatcttcctataaaatctagacagaagcattctcagaaactgctctgtgatgtctgcattcaagtcacagagttgaacattgcctttcctagagcaggtttgaaacgctctttttgtagtatatggaagtggacgtttcggacggtttgaggcccatggtgatgaagggaatatcttcccctacaagctagaaagaagcattctgtgatacttgtttgtgatgtgtgtactcaactaacagagttgaacctttctttttacagaacagttttgaaacactctttttgtagaatctgagaggggatatttggatagatttcaggatttcgttggaaacgggaatatcttcatataaaatctcgacagaagcattctcagaaacttctttgtgatatgtgcattcaagacacagagttgaatattccctttcacagagtaggtttgaaacactctttttgtagtatctggaagtggacatttggagcgccttgacgcctacggtgaaaagggaaatatcttcccataaaaactagacagaagcaatctcagaatcttctttgggatatatgcacgcagctaacagagttgaacctttctatcgacagagcagttttgaaacagtctttctgtggaatctgcaagtggatatttcgatagcttggaggatttcgttggaaacgggattacgtataaaaagtagacagcagcatcctcagaaacatctttgtgatgtgggcattcaagtcacagagttgaacattccctttcgtacagcagttttgaaacactctttctgtagtatctggaagtgaacattaggacagctttcaggtctatggtgagacaggaaatatcttcaaataaaaactagacagaagcattctcaagaacttgtttgttatgtgtgaactcagctaacagaggtggatgtttcttttgatagagcagttttgaaaaacactttttgttgaatctgcaagtggacatttggatagatatgaagatttcgttggaaacgggaatatcttcatatcaaatctagacagaagcattctcagaaacgtctttgcgatgtttgcattcaactcacagagttgaacattccgtttcagagagcagctttgaggcactctttttgtactatgtgcaactggatatttggagcgctctgaggcctacggtgaaaaagaaaatatcttcccataaccactagacagaaacattctcagaaactcctttatgacgtatgcactcacttaacagaaaagaaccttccttttgacagagcagttttgatacactctttttgtacaatctgcaagtggatatttggatagctgtgaagatttcgttggaaacgggaatatcttcctataaaatctagacagaagcattctcagaaactgctctgtgatgtctgcattcaagtcacagagttgaacattgcctttcatagagcaggtttgaaacgctctttttgtagtatatggaagtggacgttacggacggtttgaggcccatggtgataaagggaatatcttcccctacaagctagaaagaagcattctgtgaaacttgtttgtgatgtgtgtactcaactaacagagttgaacctttctttttacagagcagttttgaaacactctttttgtagaatctgcgaggggatttttggatagatttcaggatttcgttggaaacgggaatatcttcataaaacatctcgacagaagtattctcagaaacttctttgtgatatgtgcattcaagtcacagagttgaatattccctttcacagagtaggtttgaaacactctttttgtagtatctggaagtggacatttggagcgccttgacgcctacggtgaaaagggaaatatcttctcataaaaagtagacagaagcaatctcagaatcttctttgggatatatgcacgcagctaacagagttgaacctttctattgacagagcagttttgaaacagtctttctgtggaatctgcaagtggatatttggatagcttggaggatttccttggaaacgggattacgtacaaaaagtagacagcagcatcctcagaaacttctttgtgatgtgtgcattcaagtcacagagttgaacattccctttcgtacagcagttttgaaacactctttctgtagtatctggaagtgaacattaggacagctttcaggtctatggtgagaaaggaaatatcttcaaataaaaattagacagaagcattctgataaacttgtttgtgaagtgtgatctcagctaacagaggtggatctttcttttgatagagcagttctgaaaaacactttgttgaatctgcaagtggacatttggatagatttgaagatttcgttggaaacgggaatttcttcatatcaaatctagacagaagcattctcagaaacgtctttgtcatgtttgcattcaactcatagagttgaacattccgtttcagagagcagctttgaagcactctttttgtagtatgtgcaagtggatatttggagcgctctgaggcctacggtgaaaaagcaaatatcttcccataaccactagacagaaacattctcagaaactcctttacgacgtatgcactcacctaacagagaagaaccttccttttgacagagcagttttgatacactctttttgtagaatctgcaagtggatatttggatagctgtgaagatttcgttggaaacgggaatatcttcctataaaacctagacagaagcattctcagaaactgctctgtgatgtctgcattcaagtcacagagttgaacattgcctttcatagagcaggtttgaaacgctctttttgtagtatatggaagtagacgtttggagtgcattgacgcctacggtgaaaagggaaatatcttcccataaaaactagacagaagcattctgtgaaacttgtttgtgatgtgtgtactcaactaacagagttgaacctttctttttacagagcagttttgaaacactctttttgtagaatctgcgatgggatatttggatacatttcagcatttcgttggaaacgggaatatcttcatataaaatactcgacagaagcattctcagaaacttctttgtgatatgtgcattcaagtcacagagttgaatattccctttcacagagtaggtttgaaacactctttttgtagtatctggaagtggacatttggagcgccttgacgccttcggtgaaaagggaaatatcttcccataaaaactagacagaagcaatctcagaatcttctttgggatatatgcacgcagctaacagagttgaacctttctattgacagtgcagttttgaaatagtctttctgtggaatctgcaagtagatatttggatagctaggaggatttcgttggaaacgggattacgtataaaaagtagacagcagcatcctcagaaacttctttgtgatgtgtgcattcaagtcacagagttgaacattccctttcgtagagcagttttgaaacacactttctgtagtatctggaagtgaacattaggacagctttcaggtctatggtgagaaaggaaatatcttcaaataaaaactagacagaagcattctcaagaacttgtttgttatgtgtgaactcagctaacagaggtggatgtttcttttgatagagcagttctgaaaaacacgttttgttgaatctgcaagtggacatttggatagatttgaagatgtcgttggaaacgggaatatcttcatatcaaatctagacagaagcattctcagaaacgtctttgtgatgtttgcattcaactcatagagttgaacattccctttcagagagcagctttgaagcactctttttgtagtatgtgcaagtggatatttggagcgctctgaggcctaaggtgaaaaagcaaatatcttcccataaccactagacagaaacattctcagaaactcctttatgacgtatgcactcacctaacagagaagaaccttccttttgacagagcagttttgatacactctttttgtagaatctgcaagtggatatttggatagctgtgaagatttcgttggaaacgggaatatctttctataaaatctacacagaagcattctcagaaactgctctgtgatgtctgcattcaagtcacagagttgaacactgcctttcctagagcaggtttgaaacgctctttttgtagtatatggaagtggacgtttcggacggtttgaggcccatagtgataaagggaatatcttcccctacaagctagaaagaagcattctgtgaaacttgtttgtgatgtgtgtagtcaactaacagagttgaacctttctttttacagagcagttttgaaacactctttttgtagaatctgcgaggggatatttggatagatttcaggatttcgttggaaaggggaatatcttcatataaaatctcgacagaagcattctcagaaacttctttgtgatatgtgcattcaagtcacagagttgaatattccctttcacagagtaggtttgaaacactctttttgtagtatctggaagtggacatttggagcgccttgacgcccacggtgaaaagggaaatatcttcccatcaaaactagacagaagcaatctcagaatcttctttgggatatatgcacgcagctaacaaagttgaacctttctattgacagagcagttttgaaacagtctttctgtggaatctgcaagtggatatttggatagattggaggatttcgttggaaacgggattacgtataaaaagtagacagcagcatcctcagaaacttctttgtgatgtgtgcattcaagtcacagagttgaactttccctttcgtacagcagttttgaaacactctttctgtagtatctgggagtgaacattaggacagctttcaggtctatggtgagaaaggaaatatcttcaaataaaaactagacagaagcgttctcataaacttgtttgtgatgtgtgaactcagctaacagaggtggatctttcttttgatagagcagttctgaaaaacactttttgttgaatctgaaagtggacatttggatagatttgaagatttcgttggaaacgggaatatcttcatatcaaatctagacagaagcattctcagaaacgtctttgtgatgtttgcattcaactcatagagttgaacattccctttcagagagcagctttgaagcactctttttgtagtatgtgcaaggggatatttggagcgctctgaggccgacggtgaaaaagcaaatatcttcccataaccactagacagaaacattctcagaaactcctttatgacgtatgtactcaactaacagagaagaacattccgtttgacagagcagttttgatacactctttttgtagaatctgcaagtggatatttggatagctgtgaaggtttcgttggaaacggaaatatcttcctataaaatctagacagaagcattctcagaaactgctctgtgatgtctgcattcaagtcacagagttgaacattgtctttcatacagcaggtttgaagcgctctttttgtagtatatggaagtggacgtttcggacggtttgaggcccatggtgataaagggaatatcttcccctacaagctagaaagaagcattgtgtgaaacttgtttgtgatgtgtgtactcaactaacagagttgaacctttctttttacagagcagttttgaaacactctttttgtagaatctgcgaggggatatttggatagatttcaggattttgttggaaaccggaatatcttcatataaaatctcgacagaagcattctcagaaacttctttgtgatatgtgtgttcaagtcacagagttgaatactccctttcacagagtaggtttgaaacactctttttgtagtatctggaagtggacatttggagcgccttgacgcctacggtgaaaagggaaatatcttcccataaaaactagacagaagcaatctcagaatcttccttgggatatatgcacgcagctaacagagttgaacctttctattgacagagcagttttgaaacagtctttctgtggaatctgcaagtggatatttggatagattggaggatttcgttggaaacgggattacgtataaaaagtagacagcagcatcctcagaaacttctttgtgatgtgtgcattcaagtcacagagttgaacattccctttcgtacagcagttttgaaacactctttgtgtagtatctggaagtgaacattaggacagctttcaggtctatggtgagaaaggaaatatcttcaaataaagactagacagaagcattctcataaacttgtttgtgatgtgtgaactcagcttacagaggtggatctttcttttgatagagcagttctgaaaaacactttttgttgaatctgcaagtggacatttggatagatttgaagatttcgttggaaacgggaatatcttcatatcaaatctagacagaagcattctcagtaaacgtctttgtgatgtttgcattcaactcatagagttgaacattccctttcagagagcagctttgaagcactctttttgtagcatgtgcaagtggacatttggagcgccctgaggcctacggggaaaaagcaaatatcttcccataaccactagacagaaacattctcagaaactcctttatgacgtatgcactcacctaacagagaagaaccttccttttgacagagcagttttgatacactctttttgtagaatctgcaagtggatatttggatacctgtgaagatttcgttggaaacgggaatatcttcctataacatctagacagaagcattctcagaaactgctctgtgatgtctgcattcaagtcacagagttgaacattgcctttcctagatcaggtttgaaacgctctttttgtagtatatggaagtggacgtttcggacggtttgaggcccatggtgataaagggaatatcttcccctacaagctagaaagaagcattctgtgaaacttgtttgtgatgtgtgtactcaagtaacagagttgaacctttctttttacagagcagttttgaaacactctttttgtagaatctgcgaggggatatttggatagatttcaggatttcgttggaaacgggaatatcttcatataaaatctcgacagaagcattctcaggaacttctttgtgatatgtgcattcaagtcacagagttgaatattccctttcacagagtaggtttgaaacactctttttgtagtatctggaagtggacatttggagcgccttgacacctacggtgaaaagggaaatatcttcccataaaaactagacagaagcaatctcagaatcttctttgggatatatgcacgcagctaacagagttgaacgtttctattgacagagcagttttgaaacagtctttctgtggaatctgcaagtggatatttggatagcttggaggatttcgttggaaacgggattacgtataaaaagtagacagcagcatcctcagaaacttctttgtgatgtgtgcattcaagtcacagagttgaacattccctttcgtacagcagttttcaaacactctttctgtagtatctggaagtgaacattaggacagctttcagctctatggtgagaaaggaaatatcttcaaataaaaactagacagaagcattctgataaacttgtttgtgaagtgtgaactcagctaacggaggtggatctttcttttgatagagcagttctgaaaaacactttttgttgaatctgcaagtggacatttggataaatttgaagatttcgttggaaacgggaatatcttcatatcaaatctagacagaagcattctcagaaacgtctttgtgatgtttgcattcaactcatagagttgaacattccgtttcagagagcagctttgaagcactctttttgtagtatgtgcaagtggatatttggagcgctgtgaggtctacggtgaaaaagcaaatatcttcccataaccactagactgaaacattctcagaaactcctttacgacgtatgcactcacctaagagagaagaaccttccttttgacagagcagttttgatacactctttttgtagaatctgcaagtggatatttggatagctgtgaagatttcgttggaaacgggaatatcttcctataaaatctagacagaagcattctcagaaactgctctgtgatgtctgcattcaagtcactgagttgaacattgcctttcatagagcaggtttgaaacgctctttttgtactatatggaagtggacgtttcggacggtttgaggcccatggtgataaagggaatatcttcccctacaagctagaaagaagcattctgtgaaacttgtttgtgatgtgtgtactcaagtaacagagttgaacctttctttttacagagcagttttgaaacactctttttgtagaatctgcgaggggatatttggagagatttcaggatttcgttggaaacgggaatatcttcatataaaatctcgacagaagcattctcagaaacttctttgtgatatgtgcattcaagtcacagagttgaatattccctttcacagagtaggtttgaaacactctttttgtagtatctggaagtggacatttggagccccttgacgcctacggtgaaaagggaaatatcttcccataaaaactagacagaagcaatctcagaatcttctttgggatatatgcacgcagctaacagagttgaacctttctattgacagagcagttttgaaacagtctttcggtggaatctgcaagtggatatttggatagcttggaggatttcgttggaaacgggattacgtataaaaagtagacagcagcatcctcagaaacatccttgtgatgtgtgcattcaagtcacagagttgaacattccctttcgtacagcagttttgaaacactctttctgtagtatctggaagtgaactttaggacacctttcaggtctatagtgagaaaggatatatcttcaaataaaaactagacggaagcattctcataaacttgtttgtgatgtgtgaactcagctaacagaggcggatctttcttttgatagagcagttcggaaaaacactttttgttgaatctgcaagtggacatttggatagatttgaagatttccgttggaaacgggaatatcttcatatcaaatctagacagaagcattctcagaaacgtctttgcgatgtttgcattcaactcatagagttgaacattccgtttcagagagcagctttgaggcactctttttgtagtatctgcaagtggatatttggagcgctctgaggcctacggtgaaaaagcaaatatcttcccataaccactagacagaaacattctcagaaactcctttatgacgtatgcacttacctaacagagaagaaccttccttttgacagagcagttttgatacactctttttgtagaatctgcaagtggatatttggatagctgtgaagatttcgttggaaacgggaatatcttcctataaaatctacacagaagcattctcagaaactgctctgtgatgtctgcattcaagtcacagagttgaacattgcctttcatagagcaggtttgaaacgctctttttgtagtatatggaagtggacgtttcggacagtttgaggcccatggtgataaagggaatatcttcccctacaagctagaaagaagcattgtgtgaaacttgtttgtgatgtgtgtactcaactaacagagttgaacctttctttttacagagcagttttgaaacactcttttagtagaatctgcaaggggatatttggatagatttcaggatttcgttggaaacgggaatatcttcatataaaaattcgacagaagcattctcagaaacttccttgtgatatgtgcattcaggtcacagagttgaatattccctttcacagagtaggtttgaaacactctttttgtagtatctggaagtggacatttggagcgccttgacgcctacggtgaaaagggaaatatcttcccataaaaactagacagaagcaatctcagaatcttctttgggatatatgcacgcagctaacagagttgaacctttctattgacagagcagttttgaaacagtctttctgtggaatctgcaagtggatatttggatagctttgaggatttcgttggaaacgggattacgtataaaaagtagacagcagcatcctccgaaacatctttgtgatgtgtgcattcaagtcacagagttgaacattccctttcgtacagcagttttgaaacactctttctgtagtatctggaagtgaacattaggacagctttcaggtctatggtgagaaaggaaataccttccaataaaaactagacagaagcattctcataaacttgtttgtgatgtctgaactcagctaacagacgtggatatttcttttgatacagcagttttgaaaaacactttttgttgaatctgcaagtggacatttggatagatttgaagatttcgttggaaacgggaatatcttcatatcaaatctagacagaagcattctcagaaacgtctttgtgatatttgcattcaactcatagagttgaacattcccttccagagagtagctttgaagcactctttttgtagcatgtgcaagtggacatttggagcgccctgaggcctacgggtaaaaagcaaatatcttcccataaccactagacagaaacattctcagaaactcctttatgacgtatgcactcacctaacagagaagaaccttcccttttgacagagcagttttgatacactctttttgtagaatctgcaagtggatatttggatagctgtgaagatttcgttggaaacgggaatatcttcctataaaatctagacagaagcattctcagaaactgctctctgatgtctgcattcaagtcacagagttgaacattgtctttcatagagcaggtttgaaacgctctttttgtagtatatggaagtggacgtttcggacggtttgaggcccatggtgataaagggaatatcttcccctacaagctagaaagaatcattctgtgaaacttgtttgtgatgtgtgtactcaagtaacagagttgaacctttctttttacagagcagttttgaaacactctttttgtagaatctgcgaggggatatttggagagatttcaggatttcgttggaaacgggaatatcttcatataaaatctcgacagaagcattctcagaaacttctttgtgatatgtgcattcaagtcacagagttgaatattccctttcacagagtaggtttgaaacactctctttgtagtatctggaagtggacatttggagcgccttgacgcctacggtgaaaagggaaatatcttcccataataactagacagaagcaatctcagaatcttctttgggatatatgcacgcagctaacagagttgaacctttctattgacagagcagttttgaaacagtctttctgtggaatctgcaagtggacatttggatagcttggaggatttcgttggaaacgggattacgtataaaaagtagacagcagcatcctcagaaacttctttgtgatgtgtgcattcaagtcacagagttgaacattccctttcgtacagcagttttgaaacactctttctgtagtatctggaagtgaacactaagacagctttcagctctatggtgagaaaggaaatatcttcaaataaaaactagacagaagcattctcataaacttgtttgtgatgtgtgaactcagctaacggacgtggatctttcttttgatacagcagttttgaaaaacactttttgttgaatctgcaagtggacatttggatagatttgaagatttcgttggaaacgggaatatcttcatatcaagtccagacagaagcattctcagaaacgtctttgtgatgtttgcattcaactcatagatttgaacattccgtttcagagagcagctgtgaagcactctttttgtagtatgtgcaaggggatatttggagcgctctgaggcctacggtgaaaaagcaaatatcttcccataaccactagacagaacattctcagaaactcctttatgacgtatgcactcacctaacagagaagaaccttccttttgacagagcagttttgatacactctttttgtagaatctgcaagtggatatttggatagctgtgaagatttcgttggaaacgggaatatcttcctataaaatctagacagaagcattctcagaaactgctctgtgatgtctgcattcaagtcacagagttgaacattgcctttcatagagcaggtttcaaacgctctttttgtagtatatggaagtggacgtttcggacggtttgaggcccatggtgatgaaggaaatatcttcccctacaagctagaaagaagcattgtgtgaaacttgtttgtgatgtgtgtactcaactaacagagttgaacctttctttttacacagcagttttgaaacactctttttgtagaatctgcgaggggatatttggatagatttcaggatttcgttggaaacgggaatatcttcatataaaatctcgacagaagcattctcaggaaacttctttgtgatatgtgcattcaagtcacagagttgaatattccctttcacagagtaggtttgaaacactctttttgtagtatctggaagtggacatttggagcgccttgacacctacggtgaaaagggaaatatcttcccatcaaaactagacagaagcaatctcagaattttctttgggatatatgtacgcagctaatagagttgaacctttctattgacagagcagttttgaaacagtctttctgtggaatctgcaagtggatatttggatagcttggaggatttcgttggaaacgggattacgtataaaaagtagacagcagcatcctcagaaacatccttgtgatgtgtgcattcaagtcacagagttgaacattccctttcgtacagcagttttgaaacactctttctgtagtatctggaagtgaacattaggacagctttcaggtctatggtgagaaaggaaatatcttcaaataaaaactagacggaagcattctcataaacttgtttgtgatgtgtgaactcagctaacagaggttggatctttcttttgatagagcagttctgaaaaacactttttgttgaatctgcaagtggacatttggatagatttgaagatttcgttggaaacgggaatatcttcatatcaaatctagacagaagcattctcagaaacgtctttgtgatgattgcattcaactcatagagttgaacattccgtttcagagagcagctttgaagcactctttttgtagtatgtgcaagtggatatttggagtgctctggggcttacggtgaaaaagcaaatatcttcccataaccactagacagaaacattctcagaaactcctttatgacgtatgcactcacctaacagagaagaaccttctttttgacagagcagttttgatacactctttttgtagaatctgcaagtggatatttggatagctgtgaagatttctttggaaacgggaatatcttcctataaagtatagacagaaagcattctcagaaactgctctgtgatgtctgcattcaagtcacagagttgaacattgcctttcatagagcaggtttgaaatgctctttttgtagtatatggaagtggacgtttcagacggtttgaggcccatggtgataaagggaatatcttcccctacaagctagaaagagcattctgtgaaacttgtttgtgatgtgtgtactcaactaacagagttgaacctttctttttacagagcggttttgaaacactctttttgtagaatctgcgaggggatatttcgatagatttcaggatttcgttggaaacgggaatatcttcatataaaatctcgacagaagcattctcagaaacttctttgtgatatctgccttcaagtcacagagttgaatattccctttcacagagtaggtttgaaacactctttttgtagtatctggaagtggacatttggagcgccttgacgcctatggtgaaaagggaaatatcttcccataaaaactagacagaagcaatctcagaatcttctttgggatatatgcacgcaactaacagagttgaacctttctattgacagagcagttttgaaacagtctttctgtggaatctgcaagtggatatttggatagcttggaggatttcgttggaaacgggattacgtataaaaagtagacagcagcatcctcagaaacttctttgtgatgtgtgcattcaagtcacagagttgaacattccctttcatacagcagtttcgaaacactctttctgtagtatctggaagtgaactttaggagagctttcaggtctatagtgagaaaggttatatcttcaaataaaaactagacagaagcattctcatcaacttgtttgtgatgtgtgaactcagctaacagaggtggatctttcttttgatagagcagttctgaaaaacacgttttgttgaatctgcaagtggacatttggatagatttgaagatttcgttggaaacgggaatatcttcatatcaaatctagacagaagcattctcagaaacgtctttgtgatgtttgcattcaactcatagagttgaacattccgtttcagagagcagctttgaagcactctttttgtagtatgtgcaagaggatatttggagcgctctgaggcctacggtgaaaaagcaaatatcttcccataaccactagacagaaacattctcagaaactcctttatgacgtatgcactcacctaacagagaagaaccttccttttgacagagcagttttgatgcactctttttgtagaatctgcaagtggatatttggatagctgtgaagatttcgttggaaacgggaatatcttcctataaaatctagacagaagcattctcagaaactgctctgtgatgtctgcattcaagtcacagagttgaacattgcctttcatagagcaggtttgaaatgctctttttgtagtatatggaagtggacgtttcagtcggtttgaggcccatggtgataaagggaatatcgtcccctacaagctagaaagaagcattctgtgaaacttgtttgtgatgtgtgtactcaactaacagagttgaacctttctttttacagagcagttttgaaactctctttttgtagaatctgcgaggggatatttggatagatttcaggatttcgttggaaacgggaatatcttcatataaaatctcgacagaagcattctcagaaacttctttgtgataggtgcattcaagtcacagagttgaatattccctttcacagagtaggtttgaaacactctttttgtagtatctggaagtggacatttggagcgccttgacgcctacggtgaaaagggaaatatcttcccataaaaactagacagaagcaatctcagaatcttctttgggatatatgcacgcagctaacagagttgaacctttctattgacagagcagttttgaaacagtctttctgtggaatctgcaagtggatatttggagagcttggaggatttcgttggaaacgggattacgtataaaaagtagacagcagcatcctccgaaacttctttgtgatgtgtgcattcaagtcacagagttgaacattccctttcgtacagcagttttgaaacactctttctgtagtatctggaagtgaacattaggacagctttcagctctatggtgagaaaggaaatatcttcaaataaaaactacacagaagcattctcataaacttgtttgtgatgtgtgaacacagctaacagaggtggatctttcttttgatagagcagttctgaaaaacactttttgttgaatctgctagtggacatttggatagatttgaagatttcgttggaaacgggaatatcttcatatcaaatctagacagaagcattctcagaaacgtctttgtgatgtttgcattcaactcatagagttgaacattccgtttcagagagcagctttgaggcactctttttgtagtatgtgcaagtggatatttggaccgctctgaggcctgcggtgaaaaagcaaatatcttcccataaccactagacagaaatattgtcagaaactcctttatgacgtttgcactcacctaacagagaagaaccttccttttgacagagcagttttgatacactctttttgtagaatctgcaagtggatatttggatagctgtgaagatttcgttggaaacgggaatatcttcctataaaatctagacagaagcattctcagaaactgctctgtgatgtctgcattcaagtcacagagttgaacattgcctttcatagagcaggttagaaacgctctttttgtagtatatggaagtggatgtttcggacggttggaggcccatggtgataaagggaatatcttcccctacaagctagaaagaagcattctgtgaaacttctttgtgatgtgtgtactcaactaacagagttgaacctttctttttacagagcagttttgaaacactctttttgtagaatctgcgaggggatatttgaatagatttcaggatttcgttggaaacgggaatatcttcatagaaaatctcgacagaagcattctcagaaacttctttgtgatatgtgcattcaagtcacagagttgaatattccctttcacagagtaggtttgaaacactctttttgtagtatctggaagtggacatttggagcgccttgacgcctacggtgaaaaggaaaatatcttctcataaaaagtagacagaagcaatctcagaatcttctttggaatatatgcatgcagctaacagagttgaacatttctattgacagagcagttttgaaacagtctttctgtggaatctgcaagtggatatttggatagcttggaggatttcgttggaaacgggattacgtataaaaagtagacagcagcatcctcagaaacttccttgtgatgcgtgcattcaagtcacagagttgaatattccctttcgtacagcagttttgaaacactctttctgtagtatctggaagtgaactttaggagagctttcaggtctatagtgagaaaggaaatatcttcaaataaaaactagacagaagcattctgataaacttgtttgtgaagtgtgaactcagataacagagttggatctttcttttgatagagcatttctgaaaaacactttttgttgaatctgcaagtggacatttggatagatttgaagatttcgttggaaacgggaatatcttcatatcaaatctagacggaagcattctcagaaacgtctttgtgatgtttgcattcaactcatagagttgaacattccgtttcagagagcagctttgaagcactctttttgtagtatgtgcaagaggatatttggagcgctctgaggcctacggtgaaaaagcaaatatcttcccataaccagtagacagaaacattctcagaaactcctttatgacgtgtgcactcacctaacagagaagaaccttccttttgacagagcagttttgatacactctttttgtagaatctgcaagtggatatttggatagctgtgaagatttcgttggaaacgggaatatcttcctataaaatgtagacagaagcattctcagaacctgctctgtgatgtctgcattcaagtcacagagttgaacattgcctttcctagagcaggttttaacgctctttttgtagtatatggaagtggacgtttcggacggtttgaggcccatggtgataaagggaatatcttcccctacaagctagaaagaagcattctgtgaaacttgtttgtgatgtgtgtactcaactaacagagttgaacctttctttttacagagcagttttgaaacactctttttgtagaatctgcgaggggatatttggatagatttcaggatttcgttcgaaacgggaatatcttcatataaaatctcgacagaagcattctcagaaacttctttgtgatatctgcattcaagtcacagagttgaatattccctttcacagagtaggtttgaaacactctttctgtagtatctggaagtggacatttggagcgccttgacgcctatggtgaaaagggaaatatcttcccataaaaactagacagaagcaatctcagaatcttctttgggatatatgcacgcagctaacagagttgaatctttctattgacagagcagttttgaaacagtctttctgtgtaatctgcaagtggatatttggttagattggaggatttcgttggaaacgggattacgtataaatagtagacagcaacatcctcagaaacttctttgtgatgtgtgcattcaagtcacagagttgaacattccctttcgtacagcagttttgaaacactctttctgtagtatctggaagtgaacattaggacagctttcaggtctatggtgagaaaggaaatatcttcaaataaaaactagacagaagcattctcataaacttgtttgtgatgtctgaactcagctaacagaggtggatctttcttttgatagagcagttctgaaaaacactttttgttgaatctgcaagtggacatttggatagatttgaagatttcgttggaaacgggaatatcttcatatcaaatactagacagaagcattctcagaaacgtctttctgatgtttgcattcaactcatagagttgaacattccgtttcagagagcagctttgaagcactctttttgtagtatgtgcaagaggatatttggagcgctctgaggcctacggtgaaaaagcaaatatcttcccataaccactagacagaagcattctcagaaacttctttatgacgtatgtactcaactagcagagaagaactttccttttgacagagcatttttgatacactctttttgtactatctgcaagtggatatttggatagctgtgaagatttcgttggaaacgggaatatcttcctataaagtctggacagaagcattctcagaaactgctctgtgatgtctgcattcaagtcacagagttgaacattgcctttcatagagcaggtttcaaacactctttttttagtatatggaagtggacgtttcggacggtttgagaaccatggtgataaaggaaatatcttcccctacaagctagaaagaagcattctgtgaaacttgtttgtgatgtgtgtactcaactaacagaattgaacctttctttttacagagcagttttgaaacactctttttgtagaatctgcgaggggatatttggatagatttcaggatttcgttggaaacgggaatatcttcatataaaatctcgacagaagcattctcagaaacttctttgtgatatgtgcattcaagtcacagagttgaatattccctttcacagagtaggtttgaaacactctttttgtagtatctggaagtggacatttggagcgccttgacacctacggtgtaaagggaaatatcttcccataaaaactagacagaagcaatctcagaatcttctttgggatatatgtacgcagctaatagagttgaacctttctattgacagagcagttttgaaacagtctttctgtggaatctgcaagtggatatttggatagcttggaggatttcgttggaaacgggattacgtataaaaagtagacggcagcatcctcagaaacttctttgtgatgtgtgcattcaagtcacagagttgaacattccctttcgtacagcagttttgaaacactctttctgtagtatctggaagtgaacattaggacagttttcaggtctatggtgagaaaggaaatatcttcaaataaaaactagacagaagcattctcataaaattgtttgtgatatgtgaactcagctaacagacgtggatctttcttttgatacagcagttttgaaaaacactttttgttgaatctgcaagtggacatttggatagatttgaagatttcgttggaaacgggaatatcttcatatcaaatctagatagaagcattctcagaaacgtctttgtgatgtttgcattcaactcatagagttgaacattccgtttcagagagcagctttgaggcactctttttgtagtatgtgcaagtggatatttggagcgctctgaggcctacggtgaaaaagcaaatatcttcccataacaactagacagaaacattctcagaaactcctttatgacgtatgcactcacctaacagagaagaaccttccttttgacagagcagttttgatacactctttttgtagaatctgcaagtggatatttggatagctgtgaagatttcgctggaaacgggaatatcttcctataaaatctagacagaagcattctcagaaactgctctgtgatgtctgcattcaagtcacagagttgaacattgcctttgatagagcaggtttgaaacgctctttttgtagtatatggaagtggacgtttcggacggtttgaggcccatggtgataaagggaatatcttcccctacaagctagaaagaagaattctgtgaaacttgtttgtgatgtgtgtactcaactaacagagttgaacctttctttttacagagcagttttgaaacactctttttgtagaatctgcgaggggatatttggatagatttcaggatttcgttggaaaggggaatatcttcatataaaatctcgacagaagcattctcagaaacttctttgtgatatctgcctttaagtcacagagttgaatattccctttcacagagtaggtttgaaacactctttttgtagtatctggaagtggacatttggagcgccttgacacctacggtgaaaagggtaatatcttcccataaaaactagacagaagcaatctcagaatcctctttgggatatatgcacgcagctaacagagttgaacctttctattgacagagcagttttgaaacagtctttctgtggtatctgcaagtggatatttggatagcttggaggattttgttggaaacgggattacgtataaaaagtagacagcagcatcctcagaaacttctttgtgatgtgtacattggagtcacagagttgaacattccctttcgtacagcagttttgaaacactctttctgtagtatctggaagtgaacattaggacagctttcaggtctatggtgagaaaggaaatatcctcaagtaaaaactagacagaagcattctcataaacttgtttgtgatgtgtgaactcagctaacagaggtggatctttcttttgatagagcagttctgaaaaacactttttgttgaatctggaagtggatatttggatagatttgaagatttcgttggaaacgggaatatcttcatatcaaatctagacagaagcattctcagaaacgtctttgtgatgtttgcattcaactcatagagttgagcattcactttcagagagcagctttgaagcactctttttgtagtatgtgcaagtggatatttggagcgctgtgaggcctacggtgaaaaagcaaatatcttcccataaccactagacagaaacattctcagaaactcctttatgacgtatgtactcaactaagagagaagaaccttccttttcacagagcagttttgatacactctttttgtagaatctgcaagtggatatttggatagctgtgaagatttcgttggaaacgggaatatcttcctataaaatctagacagaagcattctcagaaactactctgtgatgtctgcattcaagtcacagagttgaacattgcctttcctagagcaggtttgaaacgctctttttgtagtatatggaagtggacgtttcggatggtttgaggcccatggtgataaagggaatatcttcccctacaagctagaaagaagcattctgtgaaacttgtttgtgatgtgtgtactcaactaacagagttgaaccttactttttacagagcagttttgaaacactctttttgtagaatctgcgaggggatatttggatagatttcaggatttcgttcgaaacgggaatatcttcatataaaatctcgacagaagcattctcagaaacttctttgtgatatgtgcattcaagtcacagagttgaatattccctttcacagagtaggtttgaaacactctttttgtagtatttggaagtggacatttggagcgccttgacgcctacggtgaaaagggaaatatcttccataaaaactagacagaaagcaatctcagaatcttctttgggatatatgcatgcagctaacagagttgaacctttctattgacagagcagttttgaaacagtctttctgtggaatctgcaagtggatatttggatagcttggaggatttcgttggaaacgggattacgtataaaaagtagacagagcattctcagaaactgctctgtgatgtctgcattcaagtcacagagttgaacattccctttcgtacagcagttttgaaacactctttctgtagtatctggaagtgaactttaggagagctttcaggtctatagtgagaaaggatatatcttcaaataaaaactagacagaagcattctgataaacttgtttgtgaagtgtgatctcagctaacagaggtggatctttcttttgatagagcagttctgaaaaacactttgttgaatctgcaagtggacatttggatagatttgaagatttcgttggaaacgggaatatcgtcataaatctagacagaaacattctcagaaacgtctttgtgatgtttgcattcaactcatagagttgaacattccctttcagagagcagctttgaagcactctttttgtagcatgtgcaagtggacatttggagcgccctgaggcctacggggaaaaagcaaatatcttcccataaccactagacagaaacattctcagaaactcctttatgacgtatgcactcacctaacagagaagaaccttccttttgactgagcagtttgatacactctttttgtagaatctgcaagtggatatttggatagctgtgaagatttcgttggaaacgggaatatcttcctataaaatctagacagaagcattctcagaaactactctgtgatgtctgcattcaagtcacagagttgaacattgcctttcatagagcaggtttgaaacgctctttttgtagtatatggaagtggatgtttcggacggttggaggcccatggtgatgaagggaatatcttcccctacaagctagaaagagcattctgtgaaacttgtttgtgatgtgtgtactcaactaacagagttgaacctttctttttacagagcagttttgaaacactctttttgtagaatctgcgaggggatatttggatagatttcaggatttcgttggaaacgggaatatcttcatataaaatctcgacagaagcattctcagaaacttctttgtgatatctgcattcaagtcacagagttgaatattccctttcacagagtaggtttgaaacactctttttgtagtatctggaagtggacatttggagcgccttgacgcctacagtgaaaagggaaatatcttcccataaaaactagacagaagcaatctcagaatcttctttgggatatatgcacgcagctaacagagttgaacctttctattgacagagcagttttgaaacagtctttctgtggaatctgcaagtggatatttggatagctttgaggatttcgttggaaacgggattacgtatcaaaagtagacagcagcatcctcagaaaacttctttgtgatgtgtgcattcaagtcacagagttgaacattccctttcgtacagcagttttgaaacactctttctgtagtatctggaagtgaacattaggacagctttcagctctatggtgagaaaggaaatatcttcaaataaaaactagacagaagcattctcataaacttgtttctgatgtgtgaactcagctaacagaggtggatctttcttttgatagagcagttctgaaaaacactttttgttgaatctgcaagtggacatttggatagatttgaagattttctttggaaacgggaatatcttcatatcaaatctagacagaagcattctcagaaacgtctttgtgatgtttgcattcaactcatagagttgaacattccgtttcagagaccagctttgaagcactctttttgtagtatgtgcaagtggatatttggagcgctctgaggcctacggtgaaaaagcaaatatcttcccataacgactagacagaaacattctcagaaactgctttatgacgtatgcactcacctaacagagaagaaccttccttttgacagagcagttttgatacactccttttgtagaatctgcaagtggatatttggatagctgtgaagatttcgttggaaacgggaatatcttcctataaaatctagacagaagcattctcagaaacagctctgtgatgtctgcattcaagtcacagagttgaacattgcctttcatagagcaggtttgaaacgctctttttgtagtgtatggaagtggacgtttcggacggtttgagacccatggtgataaagggaatatattcccctacaagctagaaagaagcattctgtgaaacttgtttgtgatgtgtgtactcaactaacagagttgaacctttctttttacagagcagttttgaaacactctttttgtagaatctgcgaggggatatttcgatagatttcaggatttcgttggaaacgggaatatcttcatataaaatctcgacagaagcattctcagaaacttctttgtgatatgtgcattcaagtcacagagttgaatattccctttcacagagtaggtttgaaacactctttttgtagtatctggaagtggacatttggagcgccttgacacctacggtgaaaagggaaatatcttcccataaaaactagagagaagcaatctcagaatcgtctttgggatatatgcacgcagctaacagagttgaacctttctattgagagagcacttttgaaacagtctttctgtggaatctgcaagtggatatttggatagcttggaggatttcgttggaaacgggattacgtataaaaagtagacagcagcatcctcagaaacttctttgtgatgtgtgcattcaagtcacagagttgaacattccctttcgtactgcagttttgaaacactctttctgtagtatctggaagtgaacattaggacagctttcaggtctatggtgagaaaggaaatatcttcaaataaaaactagacagaagcattctcatcaacttgtttgtgatgtgtgaactcagctaacagaggtggatctttcttttgatagagcagttctgaaaaacactttttgttgaatctgcaagtggacatttggatagatttgaagatttcgttggaaacgggaatatcttcatatcaaatctagacagaagcattctcagaaacgtctttgtgatgtttgcattcaacccatagagttgaacattccgtttcagagagcagctttgaagcactctttttgtagtatgtgcaagtggatatttggagcgctctgaggcctaaggtgaaaaagcaaatatcttcccataaccactagacagaaacattctcagaaactcctttatgacgtatgtactcaactaacagagaagaaccttccttttgacagagcagttttgatacactctttttgtagaatctgcaagtggatatttggatagctgtgaagatttcgttggaaacgggaatatcttcctataaaatccagacagaagcattctcagaaactgctctgtgatgtctgcattcaagtcacagagttgaacattgcctttcatagagtaggtttgaaacgctctttttgtagtatatggaagtagactttttggacggtttgaggcccatggtgataaagggaatatcttcccctacaagctagaaagaagcattctgtgaaacttgtttgtgatgtgtgtactcaactaacagagttgaaccattctttttacagagcagttttgaaacactctttttgtagaatctgcgaggggatatttggatagatttcaggattttgttggaaacgggaatatcttcatataaaatctcgacagaagcattctcagaaacttctttgtgatatgtgcattcaagtcacagagttgaatattcccttccacagagtaggtttgaaacactctttttgtagtatctggaagtggacatttggagcgccttgacgcctacggtgaaaagggaaatatcttcccataaaaactagacagaagcaatctcagaatcttctttgggatatatgcatgcagctaacagagttgaacctttctattgacagagcagttttgaaacagtctttctgtggaatctgcaagtggatatttggatagcttggaggatttcgttggaaacgggtttacgtataaaaagtagacagcagcatcctcagaaacttccttgtgatgtgtgcattcaagtcacagagttgcacattccctttcgtacagcagttttgaaacactctttctgtagtatctggaagtgaacattaggacagctttcaggtctatggtgagaaaggaaatatcttcaaataaaaactagacagaagcattctcataaacttgtttgtgatgtgtgaactcagctaacagaggcggatctttctgttgatagagcagttcggaaaaacactttttgttgaatctgcaagtggacatttggatagatttgaagatttcgttggaaacgggaatatcttcacatcaaatctagacagaagcattctcagaaacgtctttgtgatgtttgcattcaactcatagagttgaacattccgtttcagagagcagctttgaagcactctttttgtagtatgtgcaagtggatatttggagcgctctgaggtctacggtgaaaaagcaaatatcttcccataaccactagacagaaacattctcagaaactcctttatgacgtatgtactcaactaacagagaagaaccttccttttgacagagcagttttgatacactctttttgtagaatctgcaagtggatattgggatagctgtgaagatttcgttggaaacggtaatatcttcctataaaatctagacagaagcattctcagaaactgctctgtgatgtctgcattcaagtcacagagttgaacattgcctttcatggagcaggtttgaaacgctctttttgtagtatatggaaatggacgtttcggacggtttgaggcccatggtgataaagggaatatcttcccctacaagctagaaagaagcattctgtgaaacttgtttgtgatgtgtgtactcaactaacagagttgaacctttctttttacagagcagttttgaaacactctttttgtagaatctgcgaggggatatttggatagatttcaggatttcgttggaaacgggaatatcttcacataaaatctcgacagaagcattctcagaaacttctttgtgatatgtgcattcaagtcacagagttgaatattccctttcatagagtaggtttgaaacactctttttgtagtatctggaagtggacattttgagcgccttgacgcctacggtgaaaagggaaatatcttcccataaaaactagacagaagcaatctcagcaatcttctttgggatatatgcacgcagctaacagagttgaacctttctattgacagagcagttttgaaacagtctttctgtggaatctgcaagtggatatttggatagcttggaggatttcgttggaaacgggattacgtataaaaagtagacagcagcatcctcagaaacttctttgtgatgtgtgcattcaagtcacagagttgaacattccctttcgtacagcagttttgaaacactctttctgtagtatctgcaagtgaacattaggacagttttcaggtctatggtgagaaaggaaatatcttcaaataaaaactagacagaagcattctcataaacttgtttgtgatgtgtgaactcagctaacagaggtggatctttcttttgatagagcagttctgaaaaacacgttttgttgaatctgcaagtggacatttggatagatttgaagatgtcgttggaaacgggaatatcttcatatcaaatctagacagaagcattctcagaaacgtctttgtgatgtttgcattcaactcatagagttgaacattccgtttcagagagcagctttgaagcactctttttgtagtatgtgcaagtggatatttggagcgctctgaggcctacggtgaaaaagcaaatatcttgcccataaccactagacagaaacattctcaaaaactcctttatgacgtatgcactcacctaacagaaaagaaccttccttttgacagagcagttttgatacactctttttgtagaatctgcaagtggatatttggatagctgtgaagatttcgttggaaacgggaatatcttcctataaaatctagacagaagcattctcagaaactgctctgtgatgtctgcattcaagtcacagagttgaacattgcctttcatggagcagatttgaaacgctctttttgtagtatatggaagtagacgtttcggacggtttcaggcccatggtgataaagggaatatcttcccctacaagctagaaagaagcattactgtgaaacttgtttgtgatgtgtgtactcaactaacagagttgaacctttctttttacagagcagttttgaaacactctttttgtagaatctgcgaggggatatttggatacatttcagcatttcgttggaaacgggaatatcttcatataaaatctcgacagaagcattctcagaaacttccttgtgatatgtgcattcaggtcacagagttgaatattccctttcacagagtaggtttgaaacactctttttgtagtatctggaagtggacatttggagcgccttgacacctacggtgaaaagggaaatatcttccaataaaaactagacagaaaggaatctcagaatcttctttgggatatatgcacgcagctaacagatttgaacctttctattgacagagcagttttgaaacagtctttctgtggaatctgcaagtggatatttggatagcttggaggatttcgttggaaacgggattacgtataaaaagtagacagcagcatcctcagaaacatccttgtgatgtgtgcattcaagtcacagagttgaacattccctttcgtacagcagttttgaaacactctttctttgtatctggaagtgaactttaggacagctttcaggtctatagtgagaaaggatatatcttcaaataaaaactagacagaaacattttcataaacttgtttgtgatgtgtgaactcagctaacagaggtggatctttcttttgatagagcacttctgaaaaacactttttgttgaatctgcaagtggacatttggatagatttgaagatttcgttggaaacgggaatatcttcatatcaaatctagacagaagcattctcagaaacgtctttgcgatgtttgcattcaactcatagagttgaacattccgtttcagagagcagctttgaagcactctttttgtagcatgtgcaagtggacatttggagcgccctgaggcctacggggaaaaagcaaatatcttcccataaccactagacagaaacattctcagaaagttctttatgacgtatgtactcaactagcagagaagaactttccttttgacagagcatttctgatacactctttttgtactatctgcaagtggatatttggatagctgtgaagatttcgttggaaacgggaatatcttcctataaagtctggacagaagcattctcagaaactgctctgtgatgtctgcattcaagtcacagagttgaacattgcctttcatagagcaggtttgaaacgctctttttgtagtatatggaagtggatgtttcggacggttggaggcccatggtgataaagggaatatcttccctacaagctagaaagaagcattctgtgaaacttgtttgtgatgtgtgtagtcaagtaacagagttgaacctttctttttacagagcagttttgaaacactctttttgtagaatctgcgaggggatatttggatagatttcaggatttcgttggaaacgggaatatcttcatataaaatctcgacagaagcattctcagaaacttctttgtgatatgtgcattcaagtcacagagttgaatattccctttcacagagtaggttggaaacactctttttgtagtatctggaagtggacatttggagcgccttgacacctacggtgaaaagggaaatatcttcccattaaaaactagacagaagcaatctcagaatcttctttgggatatatgcacgcagctaacagagttgtacctttctattgacagagcacttttgaaacagtctttctgtggaatctgcaagtggatatttggatagcttggaggatttcgttggaaacgggattacatataaaaagtagacagcagcatcctcaggtaacttctttgtgatgtgtgcattcaagtcacagtgttgaacattcccttccgtacagcagttttgaaacactctttctgtagtatctggaagtgaacattaggacagctttcaggtttatggtgagaaaggaaatatcttcaaataaaaactagacagaagcattctcataaacttgtttgtgatgtgtgaactcagctaacacacgtggatctttcttttgatagagcagttctgaaaaacacttttgttgaatctgcaagtggacatttggatagatttgaagatttcgttggaaacgggaatatcttcatatcaaatctagacagaaagcattctcggaaacgtctttgtcatgtttgcattcaactcatagagttgaacattccgtttcagagagcagctttgaagcactctttttgtagtatgtgcaaggggatatttggagcgctctgaggcctaaggtgaaaaagcaaatatcttcccataaccactaaacaggaaacattctccgaaacttctttatgacgtatgtactcaactagcagagaagaactttccttttgacagagcattttcgatacactctttttgtactatctgcaagtggatatttggatagctgtgaagatttcgttggaaacgggaatatcttcctataaagtctggacagaagcatactcagaaactgctctgcgatgtctgcattcaagtcacagagttgaacattgcctttcctagagcaggtttgaaatgctctttttgtagtatatggaagtggacgtttcggacggtttgaggcccatggtgataaagggaatatcttcccctacaagccagaaagaaggattctgtgaaacttgtttgtgatgtgtgtactcaactaacagagttgaacctttctttttacagagcagttttgaaacactctttttgtagaatctgcgaggggatatttggatagatttcaggatttcgttggaaacgggaatatcttcatataaaatctcgacagaagcattctcagaaactactttgtgatatgtgcattcaagtcacagagttgaatattccctttcacagagtaggtttgaaacactctttttgtagtatctggaagtggacatttggagcgcctcgacgcctacggtgaaaagggaaatatcttcccataaaaactagacagaagcaatctcagaatcttctttggcatatatgcacgcagctaacagagttgaacctttctattgacagagcagttttgaaacagtctttctgtggaatctgcaagtggatatttggatagcttggaggatttcgttggaaacgggattacgtataaaaagtagacagcagcatcctcagaaacatccttgtgatgtgtgcattcaagtcacagagttgaacattccctttcgtacagcagttttgaaacactctttctgtagtatctggaagtgaactttaggaaagctttcaggtctatagtgagaaaggatatatcttcaaataaaaactagacagaagaatactgataaacttgtttgtgaagtgtgaactcagctaacagtggtggatctttcttttgatagagcagttttgaaaaacactttgttgaatctgcaagtggacatttggatagatttgaagatttcgttggaaacgggaatatcttcatatcaaatctagacagaagcattctcagaaacgtctttgtgatggttgcattcaactcatagagttgaacattccgtttcagagagcagctttgaagcactctttttgtagtatgttcaagtggatatttggagcgctctgaggcctacggtgaaaaagcaaatatcttcccataaccactagacagaaacattctcagaaactcctttatgacgtatgcactcacctaacagagaagaaccttccttttgacagagcagttttgatacactctttttgtagaatctgcaagtggatatttggatagctgtgaagatttcgttggaaacgggaatatcttcctataaaaactagacagaagcattctcagaaactgctctgtgatgtctgcattcaagtcacagagctgaacattgcctttcatagagcaggtttgaaacgctctttttgtagtatatggaagtggacgtttcggacggtttgaggcccatggtgataaagggaatatcttcccctacaagctagaaagaagcattctgtgaaacttgtttgtgatgtgtgtactcaagtaacagagttgaacctttctttttacagagcagttttgaaacactctttttgtagaatctgcgaggggatatttggatagatttcaggatttcgttggaaacgggaatatcttcatataaaatctcaacagaagcattctcagaaacttctttgtgatatctgcattcaagtcacagagttgaatattccctttcacagagtaggtttgaaacactctttttatagtatctggaattggacatttggagcgccttgacgcctacggtgaaaagggaaatatcttcccataaaaactagacagaagcaatctcagaatcttctttgggatatatgcacgcagctaacagagtttaacctttctattgacagagcagttttgaaacagtctttctgtggaatctgcaagtggatatttggatagcttggaggatttcgttggaaacgggattacgtataaaaagtagacagcagcatcctcagaaacttctttgtgatgtgtgcattcaagtcacagagttgaacattccctttcgtgcagcagttttgaaacactctttctgtagtatctggaagtgaacattaggacagctttcaggtctatggtgagaaaggaaatatcttcaaataaaaactagacaggagcattctcataaacttgtttgtgatgtgtgaactcagctaacagaggtggatctttcttttgatagagcagttcggaaaaacactttttgttgaatctgcaagtggacatttggatagatttgaagatttcgttggaaacgggaatatcttcatatcaaatctagacagaaacattctcagaaacgtctttgtgatgtttgccttcaactcatagagttgaacattccctttcagagagcagctttgaagcactctttttgtagcatgtgcaagtggacatttggagcgccctgaggcctacggggaaaaagcaaatatcttcccataaccactagacagaaacattctcagaaactgctttatgacgtatgcactcacctaacagagaagaaccttccttttgacagaacagttttgatacacgctttttgtagaatctgcaagtggatatttggatagctgcgaagatttcgttggaatcgggaatatcttcctataaaatctagacagaaagcattctcagaaactgctctgtgatgtctgcattcaagtcacagagttgaacattgcctttcatagagcaggtttgaaacgctctttttgtagtatatggaagtagacgtttcggacggtttcaggcccatggtgataaagggaatatcttcccctacaagctagaaagaagcattctgtgaaacttgtttgtgatgtgtgtactcaactaacagagttgaacctttccttttacagagcagttttgaaacactctttttgtagaatctgcgaggggatatttggatagatttcaggatttcgttggaaacgggaataacttcatataaaatctcgacagaagcattctcagaaacttctttgtgatatgtgcattcaagtcacagagttgaatattccctttcacagagtaggtttgaaacactctttttgtagtatctggaagtggacatttggagcgccttgatgcctacggtgaaaaggaaaatatcttctcataaaaagtagacagaagcaatctcagaatcttctttcggatatatgcacgcagctaacagagttgaacctttctattgacagagcagttttgaaacagtctttctgtggaatctgcaagtggatatttggatagcttggaggatttcgttggaaacgggattacgtataaaaattagacagcagcatcctcagaaacatccttgtgatgtgtgcattcaagtcacagagttgaacattacctttcgtacagcagttttgaaacactctttctgtagtatctggaagtgaactttaggagagctttcaggtctatagtgagaaaggatatatcttcaaataaaaactagacagaagcattctcataaacttgtttgtgatgtgtgaactcagctaacagaggtggatctttcttttgatagagcagttctgaaaaacactttttgttgaatctgcaagtggacatttggatagatttgaagatttcgttggaaacgggaatatcttcatatcaaatcaagacagaagcattctcagaaacgtctttgtgatgtttgcattcaactcatagagttgaacattccctttcagagagcagctttgaagcactctttttgtagtatgtgcaagttgacatttggagcgctttgaggcctaaggggaaaaagcaaatatcttcccataaccactagacagaaacattctcagaaactcctttatgacgtatgcactcacctaacagagaagaaccttccttttgacagagcagttttgatacactctttttgtagaatctgcaagtggatatttggatagatgtgaaggtttcgttggaaacggaaatatcttcctataaaatctagacagaagcattctcagaaactgctctgtgatgtctgcattcaagtcacagagttgaacattgcctttcatagagcaggtttgaaacgctctttttgtagtatatggaagtaaacgtttcggacggtttgaggcccatggtgataaagggaatatcttcccctacaagctagaaagaagcattctgtgaaacttgtttgtgatgtgtgtactcaattaacagagttgaacctttctttttacagagcagttttgaaacactctttttgtagaatctgcgaggggatatttggatagatttcaggattttgttggaaacgggaatatcttcatataaaatctcgacagaagcattctcagaaacttctttgtgatatctgcattcaagtcacagaggtgaatattccctttcacagagtaggtttgaaacactctttttgtagtatctggaagtggacatttggagcgccttgacgcctatggttaaaagggaaatatcttcccataaaaactagacagaagcaatctcagaattttctttgggatatatgcacacagctaacagagttgaacttttctattgacatagcagttttgaaacagtctttctgtggaatctgcaagtggatatttggatagcttggaggatttcgttggaaacgggattacgtataaaaagtagacagcagcatcctcagaagcttctttgtgatgtgtgcattcaagtcacagagttgaatattccctttcgtacagcagttttgaaacactctttctgtagtatctggaagtgaacattaggacagctttcaggtctatggtgagaaaggaaatatcttcaaataaaaactagacagaagcattctcataaacttgtttgtgatgtctgaactcagctaacagaggtgcatctttcttttgatagagcagttctgaaaaacactttttgttgaatctgcaagtggacatttggatagatttgaagatttcgttggaaacgggaatatcttcatatcaaatctagacagaggcattctcagaaacgtctttgtgatgtttgcattcaactcatagagttgaacattccctttcagagagcagctttgaagcactctttttgtagtatgtgcaaggggatatttggagcgctcctgaggcctaaggtgaaaaagcaaatatcttcccataaccactagacagaaacattctcagaaactcctttatgacgtatgcactcacctaacagagaagaaccttccttttgacagagcagttttgatacactctttttgtagaatctgcaagtggatatttggatacctgtgaagatttcgctggaaacgggaatatcttcctataaaatctagacagaagcattctcagaaactgctctgtgatgtctgcattcaagtcacagagttgaacattgcctttcatagagcaggtttgaaacgctctttttgtagtatatggaagtggacgtttcggacggtttgaggcccgtggtgataaagggaatatcttcccctacaagctagaaagaagcattctgtgaaacttgtttgtgatgtgtgtactcaactaacagagttgaacctttctttttacagagcagttttgaaaccctctttttctagaatctgcgaggggatatttggatagatttcaggatttcgttggaaacgggaatatcttcatataaaatctcgacagaagcattctcagaaacttctttgtgatatgtgcattcaagtcacagagttgaatattccctttcacagagtaggtttgaaacattctttttgtagtatctggaagtggacatttggagcgccttgacgcctacggtgaaaagggaaatatcttcccataaaaactagacagaagtaatctcagaaacttctttgggatatatgcacgcagctaacagagttgaacctttctattgacagagcagttttgaaacagtctttctgtggaatctgcaagtggatatttggatagcttggaggatttcgttggaaacgggattacgtataaaaagtagacagcagcatcctcagaaacttctttgtgatgtgtgcattcaagtcacagagttgaacattccctttcgtacagcaattttgaaacactctttctgtagtatctggaagtgaacattaggacagctttcaggtctatggtgagaaaggaaatatcttcaaataaaaactagacagaagcattctcataaacttgtttgtgatgtgtgaactcagctaacagaggtggatctttcttttgatacagcagttttgaaaaacactttttgttgaatctgcaagtggacatttggatagatttgaagatttcgttggaaacgggaatatcttcatatcaaatctagacagaagcattctcggaaacgtctttgtgatgtttgcattcaactcatagagttgaacattccgtttcagagagcagctttgaggcactcattttgcagtatgtgcaagtggatatttggagctctctgaggccttcggtgaaaaagcaaatatcttcccataaccactagacagaaactttctcagaaactcctttatgacgtatgcactcacctaacagagaagaaccttccttttgacagagcagttttgatacactctttttgtagaatctgcaagtggatatttggatagctgtgaagattttgttggaaacgggaatatcttcctataaaatctagacagaatcattctcagaaactgctctgtgatgtctgcattcaagtcacagagttgaacattgcctttcatagagcaggtttgaaacgctctttttgtagtatatggaagtggacgtttcggacggtttgaggcccatggtgataaagggaatatcttcccctacaagctagaaagaagcattctgtgaaacttgtttgtgatgtgtgtactcaactaacagagttgaacctttctttttacacagcagttttgaaacactctttttgtagaatctgcgaggggatatttggatagatttcaggatttcgttggaaacgggaatatcttcatataaaatctcgacagaagcattctcagaaacttccttgtgatatgtgcattcaagtcacagagttgaatattccctttcacagagtaggtttgaaacactctttttgtagtatctggaagtggacatttggagcgccttgatgcccacggtgaaaagggaaatatcttcccatcaaaactagacagaagcaatctcagaatcttctttgggatatatgcacgcagctaacagagttgaacctttctattgacagagcagttttgaaacagtctttctgtggaatctgcaagtggatatttggatagcttggaggatttcgttggaaacgggattacgtataaaaagtagaacagcagcatcctcagaaacttctttgtaatgtgtgcattcaagtcacagagttgaacattccctttcgtacagcagttttgaaacactctttctgtagtaactggaagtgaacattaggacagctttcaggtctatggtgagaaaggaaatatcttccaataaaaactagacagaagcattctcataaacttgtttgtgatgtgtgaactcagctaacagaggtggatctttcttttgatagagcagttctgaaaaacactttttgttgaatctgcaagtggacatttggatagatttgaagatgtcgttggaaacgggaatatcttcatatcaaatctagacagaagcattctcagaaactggtttgtgatgtttgcattcaactcttagtgttgaacactccctttcatagagcagttttgaaacactctttttgttgtatgtggaagtggacatttggagcgctttgagaactctggtgaaaaagcaaatatcttcccataaacactagacagaaacattctcagaaacttctttatgaggtatgtactcaactagcagagaagaactttccttttgacagagcactttggatacacactttttgtagtatctgcaagtggatatttggatagctgtgaagatttcgttggaaacgggaatatcttcctataaagtctggacagaagcattctcagaaactgctctgtgatgtctgcattcaagtcacagagttgaacattgcctttcatagagcaggtttcaaacactctttttttagtatatggcagtggacgattcggatggtttgaggatgatggtgataaaggaaatatcttcccctacaagctagaaagaagcattctgtgaaacttgtttgtgatgtgtgtactcaactaacagagttgaacctttctttttacagagcagttttgaaacactctttttgtagaatctgagaggggatatttggatacatttcaggatttcgttggaaacgggaatatcttcatataaaatctcgacagaagcattctcagaaacttctttgtgatatctgcattcaagtcacagagttgaatattcccttccacagagtaggtttgaaacactctttttgtagtatctggaagtggacatttggagctccttgacacctacggtgaaaagggaaatatcttcccataaaaactagacagaagcaatctcagaatcttctttgggatatatgcacgcagctaacacagttgaacctttctattgaaagagcagtttagaaacagtctttctgtggaatctgcaagtggatatttggatagctgtgaagatttcgttggaaacaggaatatcttcctataaaggctggacagaagcatcctcagaaacttctttgtgatgtgtgcattcaagtcacagagttgaacattccctttcgtacagcagttttgaaacactctttctgtagtatctggaagtgaacattaggacagctttcagctgtatggtgagaaaggaaatatcttcaaataaaaactagacagaagcattctcataaacttgtttgtgatgtgtgaactcagctaacagaggtggatctatcttttgatagagcagttctgaaaaacactttttgttgaatctgcaagtggacatttggatagttttgaagatttcgttggaaacgggaatatcttcatatcaaatctagacagaagcattctcagaaacgtctttgtgatgtttgcattcaactcatagagttgaacattccgtttcagagaccagctttgaagcactctttttgtagtatgtgcaagtggatatttggtgcgctctgaggcctacggtgaaaaagcaaatatcttcccataaccactagacagaaacattctcagaaactcctttatgacgtatgcactcacctaacagagaagaaccttccttttgacagagcagttttgatacacgctttttgtagaatctgcaagtggatatttggatagctgtgaagatttcgttggaaacgggaatatcttcctataaaatctagacagaagcattctcagaaactgctctgtgatatctgcattcaagtcacagagttgaacattgcctttcatagagcaggtttgaaacactctttttttagtatatggaagtggacgtttcggacggtttgaggaccatggtgataaaggaaatatcttcccctacaagctagaaagaagcattgtgtgaaacttgtttgtgatgtgtgtactcaactaacagagctgaacctttctttttacagagcagttttgaaacactctttttgtagaatctgcgaggggatatttggatagatttcaggatttcgttggaaacgggaatatcttcatataaaatctcgacagaagcattctcagaaacatctttgtgatatgtgcattcaagtcacagagttgagtattccctttcacagagtaggtttgaaacactccttttgtagtatctggaagtggacatttggagcgccttgacacctactgtgaaaagtgaaatatcttcccataaaaactagacagaagcaatctcagaattttctttgggatatatgcacacagctaacagagttgaacctttctattgacatagcagttttgaaacagtctttctgtggaatctgcaagtggatatttggatagcttggaggatttcggtggaaacgggattacgtataagaagtagacagcagcatcctcagaaacttctttgtgatgtgtgcattcatgtcacagagttgaacattccctttcgtacagcagttttgaaacactctttctgtagtatgtggaagtgaacattaggacagctttcaggtctatggtgagaaaggaaatatcttcaaataaaaactagacagaagcattctcataaacttgttcgtgatgtgtgaactcagctaacacacgtggatctttcttttgatagagcagttctgaaaaacactttttgttgaatctgcaagaggacatttggatagatttgaagatttcgttggaaacgggaatatcttcatatcaaatctagacagaaagcattctcagaaacgtctttgtgatgtttgcattcaactcatagagttgaacattccctttcagagagcagctttgaagcactctttttgtagcatttgcaagtggacatttggagcgccctgaggcctacggggaaaaagcaaatatcttcccataaccactagacagaaacattctcagaaactcctttatgacgtatgcactcacctaacagaaaagaaccttccttttgacagagcaggtttgatacactctttttgtagaatctgcaagtggttatttggatagctgtgaagatttcgttggaaacgggaatatcttcctataaaatctagacagaagcattctcagaaactgctctgtgatgtctgcattcaagtcacagagttgaacattgcctttcatacagcaggtttgaaacgctctttttgtagtatatggaagtggacatttcggacggtttgaggaccatggtgataaaggggaatcttcccctacaagctagaaagaagcattctgtgaaacttgtttgtgatgtgtgtactcaactaacagagttgaacctttctttttacagagcagttttgatacactctttttgtagaatctgcgaggggatatttggatacatttcaggatttcgttggaaatgggaatatcttcatataaaatatcgacagaagcattctcagaaacttccttgtgatatgtgcattcaagtcacagagtggaatattccctttcacagagtaggtttgaaacactctttttgtagtatctggaagtggacatttggagcgccttgacgcccacggtgaaaagggaaatatcttcccataaaaactagacagaagcaatctcagaaaattctttgggatatatgcacgcagctaacggagttgaacatttctattgacagagcagttttgaaacagtcgttctgtggaatctgcaagtggatatttggatagcttggaggatttcgttggaaacgggattacgtataaaaagtagacagcagcatcctcagaaacttctttgtgatgtgtgcattcaagtcacagagttgaacattccctttcgtacagcagttttgaaacactctttctgtagtatctggaagtgaacattaggacagctttaagctctatggtgagaaaggaaatatcttcaaataaaaactagacagaagcattctcataaacttgtttgtgatgtgtgaactcagctaagagacgtggatctttcttttgatagagcagttctgaaaaacactttttgttgaatctgcaagtggacatttggatagatttgaagatttctttggaaacgggaatatcttcatatcaaatctagagagaagcattctcagaaacgtctttgtgatgtttgcattcaactcatagagttgaacattctctttcagagaggagctttgaagcacactttttttagtatgtgcaagtggacatttggagcgctttgaggcctacggggaaaaagcaaatatcttcccataaccactagacaggaacattctcagaaactcctttatgacgtatgcactcacctaacacagaagaaccttccttttgacagagcatttttgatacactctttttgtagcatctgcaagtggatatttggatatctgtgaagatttcgttggaaacgggaatatcttcctataaaatctagacagaagcattctcagaaactgctctgtgatgtctgcattgaagtcacagagttgaacattgcctttcatagagcaggtttgaaacgctctttttgtagtatatggaagtagacgtttcggacggtttgaggcccatggtgataaagggaatatcttcccctacaagctagaaagaagcattctgtgaaacttgtttgtgatgtgtgtactcaactaacagagttgaacctttctttttacagagcagttttgaaacactctttttgtagaatctgcgaggggaaatttggatagatttcaggatttctttggaaacgggaatatcttcatacaaaatctcgacagaagcattctcagaaacttctttgtgatatctgcattccagtcacagagttgaatattccctttcacagagtaggtttgaaacactctttttatagtatctgcaattggacatttggagtgccttgacgcctacggtgaaaagggaaatatcttccgataaaaactagacagaagcaatctcagaatcttctttgggatatatgcacgcagctaacagagttgaacctttctattgacagagcaggtttgaaacagtctttctgtggaatctgcaagtggatatttggatagcttggaggatttcgttggaaacgggattacgtataaaaagtagacagcagcatcctcagaaacttctttgtgatgtgtgcattcaagtcacagagttgaacattccctttcgtacagcagttttgaaacactctttctgtgagtatctggtagtgaacattaggacagctttcagctctatggtgagaaaggaaatatcttcaaataaaaactagacagaagcattctcataaacttgtttgtgatgtgtgaactcagcaaacagcggtggatctttcttttgatagagcagttctgaaaaacactttttgttgaatctgcaagtggacatttggatagttttgaagatttcccttggaaaaaggaatatcttcatatcaaatctagacagaagcattttcagaaacgtctttgtgatgtttgcattcaactcatagagttgaacattccgtttcagagagcagctttgaggcacactttttgtagtatgtgcaagtggatatttggagcgctgctgaggcctacggtgaaaaagcaaatatcttcccataaccactagacagaaacattctgagaaactcctttatgacgtatgcactcacctaacagagaagaaccttccttttgacagagcatttttgatacactctttttgtagaatctgcaagtggatatttggatagctgtgaagatttcgttggaaacgggaatatcttcctataaaatctagacagaagcattctcagaaactgctctgtgatgtctacattcaagtcacagagttgaacattgcctttcatagagcaggtttgaaacgctctttttgtagtatatggaagtggacgtttcggacggtttgaggcccatggtgataaagggaatatcttcccctacaagctagaaagaagcattctgtgaaacttgtttgtgatgtgtgtactcaactaacagagttgaacctttctttttacagagcagttttgaaacactctttttgtagaatctgtgaggggatatttggatagatttcaggatttccttggaaacgggaatatcttcatataaaatctcgacagaagcattctcagaaacttctttgtgatatctgcattcaagtcacagagttgaatattccctttcacagagtaggtttgaaacactctttttgtagtatctggaagtggacatttggagcgccttaacacctacggtgaaaagggaaatatcttcccataaaaactagacagaagcaatctcagaatcttctttgggatatatgcacgcagctaacagagttgaaccttactattgacagagcagttttgaaacagtctttctgtggaatctgcaagtggatatttggatagcttggagtatttcgttggaaacgggattaagtataaaaagtagacagcagcatcctcagaaacttctttgtgatgtgtgcattcaagtcacagagttgaacattccctttcgtacagcagttttgaaacactctttctgtagtatctggaagtgaacattagtacagctttcagctctatggtgagaaaggaaatatcttcaaataaaaactagacagaagcattctcataaacttgtttgtgatgtgtgaactcagctaacagaggtggatctttcttttgatagagcagttctgaaaaacactttttgttgaatctgcaagtggacatttggatagatttgaagatttcgttggaaacgggaataccttcatatcaaatctagacagaagcattctcagaaacgtctttgtgatgtttgcattcaactcatagagttgaacattccctttcacagagcagctctgaagaactcttttgatagtatgtgcaaggggatatttgtagcgctctcaggcctacggtgaaaaagcaaatatcttcccataacgactagacagaaacattttcagaaactcctttatgacgtatgcactcacctaacagagaagaaccttccttttgacagagcacttttgatacactctttttgtagaatctgaaagtggatatttggatagctgtgaagatttcgttggaaacgagaatatcttcctataaaatctagacagaagcattctcagaaactgctctgtgatgtctgcattcaagtcacagagttgaacattgcctttcatagagcaggtttgaaacgctctttttgaagtatatggaagtggacgtttcggacggtttgaggcccatggtgataaagggaatatcttcccctacaagctagaaagaagcattctgtgaaacttgtttgtgatgtgtgtactcaactaacagagttgaacctttctttttacagagcagttttgagacactctttttgtagaatctgcgaggggatatttggatagatttcaggatttctttggaaacgggaatatcttcatataaaatctcgacagaagcattctcagaaacttctttgtgatatctgccttcaagtcacagagttgaatataccctttcacagagtaggtttgaaacactctttttgtagtatctggaagtggacatttggagcgccttgacgcctacggtgaaaagggaaatatcttcccataaaaactagacagaagcaatctcagaatcttctttgggatatatgcacgcagctaacagagttgaacctttctattgacagagcagttttgaaacagtctttctgtggaatctgcaagtggatatttggatagattggaggatttcgttggaaacgggattacatataaaaagtagacagcagcatcctcagaaacttctttgtgatgtgtgcattcaagtcacagagttgaacattccctttcgtacagcagttttgaaacactctttctgtagtatctggaagtgagcattaggacagctttcaggtctatggtgagaaaggatatatcttcaaataaaaactagacagaagcattctcataaacttgtttgtgatgtgtgaactcagctaacagacgtggatctttcttttgatacagcagttttgaaaaacactttttgttgaatctgcaagtggacatttggatagatttgaagatttcgttggaaacgggaatatcttgatatcaaatctagacagaagcattctcagaaacgtctttgtgatgtttgcattcaactcatagagttgaacattccgtttcagagagcagctttgaagcactctttttgtagtatctgcaagtggatatttggagcgctctgaggcctacggtgaaaaagcaaatatcttcccataaccactagacagaaacattctcagaaactcctttatgacgtatgcactcacctaacagagaagaaccttccttttgacagagcagttttgatacactctttttgtagaatctgaaagtggatatttggatagctgtgaagatttcgttggaaacgggaatatcttcctataaaatctagacagaagcattctcagaaactgctactgtgatgtctgcattcaagtcacagagttgaacattgcctttcatagagcaggtttgaaacgctctttttgtagtatatggaagttgacgtttcggacggtttgaggcccatggtgataaagggaatatcttcccctacaagctagaaagaagcattctgtgaaacttgtttgtgatgtgtgtactcaactaacagagttgaacctttctttttacagagcagttttgaaacactctttttgtagaatctgtgaagggatatttggatagatttcaggatttctttggaaacgggaatatcttcatataaaatctcgacagaagcattctcagaaacttctttgtgatatgtgcattaaagtcacagagttgaatattccttttcacagagtaggtttgaaacactctttttgtagtatctggaagtggacatttggagcgccttgacacctacggtgaaaagggaaatatcttcccataaaaactagacagaagcaatctcagaattttctttgggatatatgcacacagctaacagagttgaacttttctattgacatagcagttttgaaacagtctttctgtggaatctgcaagtggatatttggatagcttggaggatttcgttggaaaccggattacgtataaaaagtagacagcagcatcctcagaaacttctttgtgatgtgtgcattcaagtcacagagttgaatattccctttcgtacagcagttttgaaacactctttctgtagtatctggaagtgaaaattaagacagctttcagctctatggtgagaaaggaaatatcttcaaataaaaactagacagaagcattctcataaacttgtttgtgatgtgtgaactcagctaacacacgtggatctttcttttgatagagcagttctgaaaatcacttttgttgaatctgcaagtggacatttggatatatttgaagatttcgttggaaacgggaatatcttcatatcaaatctagacagaagcattctcagaaacgtctttgtgatgtttgcattcaactcatagagttgaacattccctttcagagagcagctttgaagcactctttttgtagtatgtgcaagagaaaatttggagcgccctgaggcctacggtgaaaaagcaaatatcttcccataaccactagacagaaacattctcagaaactcctttatgacgtatgcactcacctaacagagaagaaccttccatttgacagagcagttttgatacactctttttgtagaatctgcaagtggatatttggatagctgtgaagatttcgctggaaacgggaatatcttcctataaaatctagacagaagcattctcagaaactgcgctgtgatgtctgcattcaagtcacagaattgaacattgcctttcatagagcaggtttgaaacgctctttttgtactatatggaagaggacgtttcggacggtttgaggaccatggtgataaagggaatatcttcccctacaagctagaaagaagcattctgtgaaacttgtttgtgatgtgtgtactcaactcacagagttgaacctttctttttacagagcagttttgaaacactctttttgtagaatctgcgagggcatatttggatagatttcaggatttcgttggaaaggggaatatcttcatataaaatctcgacagaagcattctcagaaacttctttgtgatatgtgcattcaagtcacagagttgaatattccctttcacagagtaggtttgaaacactctttttgtagtatctggaagtggacatttggagcgccttgacgcctacagtgaaaacggaaatatcttcccataaaaactagacagaagcaatctcagaatcttctttgggatatatgcacgcagctaacagagttgaacctttctattgacagagcagttttgaaacagtctttctgtggaatctgcaagtggatatttgtatagcttggaggattttcgttggaaacgggattacgtataaaaagtagacagcagcatcctcagaaacttctttgtgatgtgtgcattcaagtcacagagttgaacattcccttttgtacatcagttttgaaacactctttctgtagtatctggaagtgaacattaggacagctttcaggtctatggtgagaaaggaaatatcttcaaataaaaactagacagaagcattctcataaacttctttgtgatgtgtgaactcagctaaccgaggtggatctttcttttgatagagcagttctgaaaaacactttttgttgaatctgcaattggacatttggatagatttgaagatttcgttggaaacgggaataacttcatttcaaatctagacagaagcattctcagaaacgtctttccgatgtttgcattcaactcatagagttgaacattccctttcagagagcagctttgaagcactctttttgtagcatgtgcaagtggacatttggagggccctgaggcctacggggaaaaagcaaatatcttcccataaccactagacagaaacattctcagaaactcctttatgacgtatgcactcacctaacagagaagaaccttccttttgacagagcagttttgatacactctttttgtagaatctgcaagtggatatttggatagctgcgaagatttcgttggaaacgggaatatcttcctataaaatctagacagaagcattctcagaaactgctctgtgatgtctgcattcaagtcacagagctgaacattgcctttcatagagcaggtttgaaacgctctttttgtagtatatggaagtggacgtttcggatggtttgaggcccatggtgataaagggaatatcttcccctacaagctagaaagaaagcattctgtgaaacttgtttgtgatgtgtgtactcaactaacagagttgaacctttcttttcacagagcagttttgaaacactctttttgtagaatctgcgaggggatatttggatagatttcaggatttcgttggaaacgggaatatcttcatataaaatctcgacagaagcattctcagaaacttctttgtgatacgtgcattctagtcacaccgttgaatattccctttcacagagtaggtttgaaacactctttttgtagtatctggaagtggacatttggagcgccttgacgcctacggtgaaaagggaaatatcttcccataaaaactagacagaagcaatctcagaatcttctttgggatatatgtacgcagctaatagagttgaacctttctattgacagagcagttttgaaacagtctttctgtggaatctggaagtggatatttggatagcttggaggatttcgttggaaacgggattacgtataaaaagtagacagcagcatcctcagaaacatctttgtgatgtgtgcattcaagtcacagagttgaacattccctttcgtacagcagttttgaaacactctttctgtagtatctggaagtgaacattaggacagctttccggtctatggtgagaaaggaaatatcttcaaataaaaactagacagaagcattctcataaacttgtttgtgatgtgtgaactcagctaagagacgtggatctttcttttgatagagcagttctgaaaaacactttttgttgaatctgcaagtggacatttggatagatttgaagatttctttggaaacgggaatatcttcatatgaaatctagagagaagcattctcagaaacgtctttgtcatgtttgcattcaactcatagagttgaacattccgtttcagagagcagctttgaagcactctttttgtagtatgtgcaagcggatatttggagcactctgaggcctacggtgaaaaagcaaatatcttcccataaccactagacagaaacattctcagaaactcctctatgacgtatgcactcacctaacagagaagaaccttcgttttgacagagcagttttgatacactctttttgtagaatctgcaagtggatatttggatagctgtgaagatttcgttggaaacgggaatatcttcctataaaatctagacagaagcattttcagaaactgctctgtgatatctgtattcaagtcacagagttgaacattgcctttcatagagcaggtttgaaacgctctttttgtagtatatgtaagtggatgtttcggacggttggaggcccatggtgataaagggaatatcttcccctacaagctagaaagaagcattgtgtgaaacttgtttgtgatgtgtgtagtcaactaacagagttgaacctttctttttacagagcagttttgaaacactctttttgtagaatctgcgaggggatatttggatagatttcaggatttcgatggaaacgggaatatcttcatataaaatctcgacagaagcattctcagaaacttctttgtgatatgtgcattcgagtcacagagttgaatattccctttcacagagtaggttagaaacactctttttgtagtatctggaagtggacatttggagcgccttgacacctacggtgaaaagggaaatatcttcccataaaaactagacagaagcaatctgagaatcttctttgggatatatgcacgcagctaacagagttgaacctttctattgacagagcagttttgaaacagtctttctgtggaatctgcaagtggatatttggatagcttggaggatttcgttggaaacgggattacgtataaaaagtagacagcagcatcctctgaaacttctttgtgatgtgtgcattcaagtcacagagttgaacattccctttcgtacagcagttttgaaacactctttctgtagtatctggaagtgaacattaggacagctttcagctctatggtgagaaaggaaatatcttcaaataaaaactagacagaagcattttcataaacttgtttgtgatgtgtgaactcagctaacagaggtggatctttcttttgatagagcagttctgaaaaacacttttttttgaatctgcaagtggacatttggatagatttgaagatttcgttggaaacgggaatatcttcatatcaaatctagacagaagcattctcaggaaacgtctttgtgatgtttgcattcaactcatagagttgaacattccgtttcaaagagcagctttgaggcactctttttgtagtatgtgcaagtggatatttggagcgctctgaggcctacggtgaaaaagcaaatatcttcccataaccactagacagaaacattctcagaaactcgtttatgacgtatgcactcacctaacagagaagaaccttccatttgacagatcagttttgatacactctttttgtagaatctgcaagtggatatttggatagctgtgaagattttgctggaaacgggaatatcttcctataaaatctagacagaaagcattctcagaaactgctatgtgatgtctgcattcaagtcacagagttgaacattgcctttcctagagcaggtttgaaacgctctttttgtagtatatggaagtggacgtttcggacggtttgaggcccatggtgataaagggaatatcttcccctacaagctagaaagagcattgtttgaaacttgtttgtgatgtgtgtactcaactaacagagttgaacctttctttttacagagcagttttgaaacactctttttgtagaatctgcgaggggatatttggatacatttcagcatttcgttggaaacgggaatatcttcatataaaatctcgacagaagcattctcagaaacttctttgtcatatctgccttcaagtcacagagttgaatattccctttcacagagtaggtttgaaacactctttttgtagtatctggaagtggacatttggagtgccttgacgcctacggtgaaaatggaaatatcttcccataaaaactagacagaagcaatctcagaattttctttgggatatatgcacacagctaactgagttgaacttttctattgacatagcagttttgaaacagtctttctgtggaatctgcaagtggatatttggatagcttggaggatttcgttggaaatgggattacgtataaaaagtagacagcagcatcctcagaaacttctttgtgatgtatgcattcaactcccagagttgaacattccctttcgtacagcagttttgaaacactctttctgtagtatctggaagtgaacattaggacagctttcaggtctatggtgagaaaggaaatatcttcaaataaaaactagacagaagcattctcataaacttgtttgtgatgtgtgaactcagctaacagaggtggacctttcttttgatagagcagttctgaaaaacactttttgttgaatctgcaagtggacatttggatagatttgtagatttcgttggaaacgggaatatcttcatatcaaatctagacagaagcattctcagaaacgtctttgtgatgtttgcattcaactcatagagttgaacattccgtttcagagagcagctttgaagcactctttttgtagtatgtgcaagtggatatttggagcgctctgaggcctacagtgaaaaagcaaatatcttcccataaccactagacagaaacattctcagaaactcctttatgacgtatgcactcacctaacagagaagaaccttccttttgacagagcagttctgatacactctttttgtagaatctgcaagtggatatttggatagctgtgaagatttcgttggaaacgggaatatcttcctataaaatctagacagaagcattctcagaaactgctctgtgatgtctgtattcaagtcacagagttgaacattgcctttcatagagcaggtttgaaatgctctttttgtagtatatggaagtggacttttcggacggtttgaggcccatggtgataaagggaatatcttcccctacaagctagaaagaagcattctgtgaaacttgtttgtgatgtgtgtactcaattaacagagttgaacctttctttttacagagcagttttgaaacactctttttgtagaatctgcgaggggatatttggatagatttcaggatttcattggaaacgggaatatcttcatataaaatctcgacagaagcaatctcagaatcttctttgggatatatgcacgcagctaacagagttgaacctttctattgacagagcagttttgaaacagtctttctgtggaatctgcaagtggatatttggatagcttggaggatttcgttggaaacgggattacgtataaaaactagacagccgcatcctcagaaacttctttgtgatgtgtgcattcaagtcacagaattgaacattccctttcgtacagcagttttgaaacactttttctgtagcatctggaagagaacattaggacagctttcaggtctatggtgagaaaggaaatatcttcaaataaaaactagacagaaagcattctcataaacttgtttgtgatgtgtgaactcagctaacagaggtggatctttcttttgatagagcagttctgaaaaacactttttgttgaatctgcaagtggacatttggatagatttgaagatttcgttggaaacgggaatatcttcatatcaaatctagacagagcattctcagaaacgtctttgtgatgtttgcattcaactcatagagttgaacattccctttcagagagcagctttgaagcactctttttgtagcatgtgcaagtggacatttggagcgccctgaggcctacggggaaaaagcaaatatcttcccataaccactacacagaaacattctcagaaactcctttatgacgtatgcactcacctaacagagaagaaccttccttttgacagagcagttttgatacactctttttgtagaatctgcaagtggatattttgatagctgtgaagatttcgttggaaacgggaatatcttcctataatatctagacagaagcattctcagaaactgctctgtgatgtctgcattcaagtcacagagttgaacattgcctttcctagagcaggtttgaaacgctctttttgtagtatatggaagtggaagtttcggacggtttgaggcccatggtgataaagggaatatcttcccctacaagctagaaggaagcattctgtgaaacttgtttgtgatgtgtgtactcaactaacagagttgaacctttctttttacagagcagttttgaaacactctttttgtagaatctgcgaggggatatttggatagatttcaggatttcgttgcaaacgggaatatcttcatagaaaatctcgacagaagcattctcagaaacttctttgtgatatctgccttcaagtcacagagttgaatattccctttcgcagagtaggtttgaaacactctttttgtagtatctggaagtggacatttggagctccttgacacctacagtgaaaagggaaatatcttcccataaatactagacagaagcaatctcagaattttctttgggatatatgcacacagctaacagagttgaacctttctattgacatagcagttttgaaacagtctttctgtggaatctgcaagtggatatttggatagcttggaggatttcgttggaaacgggattacgtataagaagtagacagcagcatcctcagaaacttctttgtgatgtgtgcattcaagtcacagagttgaacatcacctttcgtacagcagttttgaaacactctttctgtagtatctggaagtgaacattaggtcagctttcaggtctatggtgagaaaggaaatatcttcaaataaaaactagacagaagcattctcataaacttgtttgtgatgtgtgaactcagctaagagacgtggatctttcttttgatagagcagttctgaaaaacactttttgttgaatctgcaagtggacatttggataggtttgaagatttgctttggaaacgggaatatcttcatatcaaatctagacagaagcattctcagaaacgtctttgtgatgtttgcattcaactcatagagttgaacattccctttcagagaccagctttgaagcactctttttgtagcatgtgcaagtggacatttggagcgccctgaggcctacggggaaaaagcaaatatcttcccataaccactagacagaaacattctaagaaactcctttatgacgtatgcactcacctaacagagaagaaccttccttttgacagagcagttttgatacactctttttgtagaatctgcaagtggatatttggatagctgtgaagatttcgttggaaacgggaatatcttcctataaaatctagacagaagcattctcagaaactgctctgtgatgtctgcattcaagtcacagagttgaacattgcctttcatagagcaggtttgaaatgctctttttgtagtatatggaagtggacgtttcagacggtttgaggccgatggtgataaagggaatatcttcccctacaagctagaaagaagcattctgtgaaacttgtttgtgaggtgtgtactcaactaacagagttgaacctttctttttacagagcagttttgaaacactcttttcgtagaatctgcgaggggatatttggatagatttcaggatttcgttggaaacgggaatatcttcatataaaatctcgacagaagcattctcagaaacttctttgtgatatctgcattcaagtcacagagttgaatattccctttcacagagtaggtttgaaacactctttttgtagtatctggaagtggacatttggagcgccttgacgcctacggtgaaaagggaaatatcttcccataaaaactagacagcaagcaatctcagaatcttctttgggatatatgcacgcagctaacagagttgaacctttctattgacagagcagttttgaaacattctttctgtggaatctgcaagtggatatttggatagcttggaggatttcgttggaaacgggattacgtataaaaagtagacagagaatcctcagaaacttctttgtgatgtgtgcattcaagtcacagagttgaacattccctttcgtacagcagttttgaaacactctttctgtagtatctggaagtgaacattaggacagctttcaggtctatggtgagaaaggaaatatcttcaaataaaaactagacagaagcattctcataaacttgtttgtgatgtgtaaactcagctaacagaggtggatctttcttttgatagagcagttctgaaaaacactttttgttgaatctgcaagtggatatttggatagatttgaagatttcgttggaaacgggaatatcttcatatcaaatctagacagaagcattctcagaaacgtctttgtgatgtttgcattcaactcatagagttgaacattccgtttcagagagcagctttgaagcactctttttgtagtatgtgcaagtggatatttggagcgctctgaggcctacggtgaaaaagcaaatatcttaccataaccactagacagaaacattctcagaaactcctttatgacgtatgcactcacctaacagagaagaaccttccttttgacagagcagttttgatacactctttttgtagaatctccaagtggatatttggatagctgtgaaggtttcgttggaaacggaaatatcttcctataaaatctagacagaagcattctcagaaactgctctgtgatgtctgcattcaagtcacagagttgaacattgcctttcatagagcaggtttgaaaccctctttttgaagtatatggaagtggacgtttcggacggtctgaggcccatggtgataaagggaatatcttcccctacaagctagaaagaagcattctgtgaaacttgtttgtgatgtgtgtactcaactaacagagttgaacctttctttttacagagcagttttgaaacactctttttgtagaatctgcgaggagatatttggatagatttcaggattttgttggaaacgggaatatcttcatataaaatcgcgacagaagcattctcagaaacttctttgtgatatctgccttcaagtcacagagttgaatattccctttctcagagtaggtttgaaacactctttttgtagtatctggaagtggacatttggagcgccttgacacctacggtgaaaagggaaatatcttcccataaaaactagacagaagcaatctcagaatcttctttgggatatatgcacgcagctaacagagttgaacctttctattgacagagcagttttcaaacagtctttctgtggaatctgcaagtggatatttggatagcttggaggatttcgttggaaacgggattacgtataaaaagtagacagcagcatcctcagaaacttctttgtgatgtgtgcattcaagtcacacagttgaacattccctttcgtacagcagttttgaaacactctttctgtagtatctggaagtgaacattaggacagctttcagctctatggtgagaaaggaaatatcttcagataaaaactagacagaagcattctcataaacttgtttgtgatgtgtgaactcagctaacagaggtggatctttcttttgatagagcagttctgaaaaacactttttgtggaatctgcaagtggacatttgaatagatttgaagatttcgttggaaacgggaatatcttcatatcaaatctagacagaagcattctcagaaacgtcgttgtgatgtttgcattcaactcatagagttgaacattccgtttcagagagcagctttgaggcactctttttgtagtatgtgcaagtggatatttggagcgctctgaggcctacggtgaaaaagcaaatatcttcccataaccactagacagaaacattctcagaaactcctttatgacgtatgtactcaactaacagagaagaaccttccttttgacagagcagttttgatgcactctttttgtagaatctgcaagtggatatttggatagctgtgaagatttcgttggaaacgggaatatcttcctataaaatctagacagaagcattctcagaaacagctctgtgatgtctgcattcaagtcacagagttgaacattgcctttcatagagccggtttgaaacgctctttttgtagtatataaaagtggacgtttcggacggtttgaggcccatggtgataaagggaatatcttcccctacaagctagaaagaagcattctgtgaaacttgtttgtgatgtgtgtactcaactaacagagttgaacctttctttttacagagcagttttgaaacactctttttgtagaatctgcgaggggatatatggatagatttcaggatttcgttggaaacgggaatatcttcatataaaatctcgacagaagcattctcagaaacttctttgtgatatctgcattcaagtcacagagttgaatattccctttcacagtgtaggtttgaaacactcttttgtagtatctggaagtgtacatttggagcgccttgacgcctacggtgaaaagggaaatatcttcccataaaaactagacagaagcaatctcagaatcttctttgggatatatgcacgcagctaacagagttgaacctttctattgacagagcagttttgaaacagtctttctctggaatctgcatgtggatatttggatagcttggaggatttcgttggaaacgggattacgtataaaaagtagacagcagcatcctcagaaacttctttgtgatgtgtgcattcaagtcacagagttgaacattccctttcgtacagcagttttgaaacactctttctgtagcatatggaagtgaacattagaacagctttcagatctatggtgagaaaggaaatatcttcaaataaaaactagacagaagcattctcataaacttgtttgtgatgtgagaactcagctaacagaggtggatgtttcttttgatagagcagttctgaaaaacactttttgttgaatctgcaagtggacatttggatagatttgaagatttcgttggaaacgggaatatcttcatatcaaatctagacagaagcattctcagaaacgtcgttgtgatgtttgcattcaactcatagagttgaacattccgtttcagagagcagctttgaggcactctttttgtagtatgtgcaagtggatatttggagcgctctgaggccttcggtgaaaaagcaaatatcttcccataaccactagacagaaacattctcagaaactcctgtatgacgtatgcactcacctaacagagaagaaccttccttttgacagagcagttttgatacactctttttgtaggatctgcaagtggatatttggatagctgtgaagatttcgttggaaacgggaatatcttcctataaaatctagacagaagcattctcagaaactgctctgtgatgtctgcattcaagtcacagagttgaacattgcctttcatagagcaggtttgaaacgctctttttgtagtatatggaagtggatgtttcggacggttggaggcccgtggtgataaagggaatatcttcccctacaagctagaaagaaacattctgtgaaacttgtttgtgatgtgtgtactcaactaacagagttgaacctttctttttacagagcagttttgaaacactctttttgtagaatctgcgaggggatatttggatagatttcaggatttcgttggaaacgggagtatcttcacataaaatctcgacagaagcattctcagaaacttctttgtgatatgtgcattcaagtcacagagttgaatattccctttcacagagtaggtttgaaacactctttttgtagtatctggaagtggacatttggagcgccttgacacctacggtgaaaagggaaatatcttcccataaaaattagacagaagcaatctcagaatcttctttgggatatatgcacgcagctaacagagttgaacctttctattgacagagcagttttgaaacagtctttctgtggaatctgcaagtggatatttggatagcttggaggatttcgttggaaacgggattacgtatacaaagtagccagcagcatcctcagaaacttctttgtgatgtgtgcattcaagtcacagagttgaacattccttttcgtacagcagttttgaaacactctttctgtagtaactggaagtgaacattaggacagctttcagctctatggtgaaaaaggaaatatcttcaaataaaaactagacagaagcattctcataaacttgtttgtgatgtctgaactcagctaacagaggtggatctttcttctgatagagcagtactaaaaacgctttttgttgaatctgcaagtggacatttggatagatttgaagatttcgttggaaacgggaatatcttcatatcaaatctagacagaagcattctcagaaacgtctttgtgatgtttgcattcaactcatagagttgaacattccgtttcaaagagcagctttgaggcactctttttgtagtatgtgcaagtggatatttggagcgctctgaggcctaaggtgaaaaagcaaatatcttcccataaccactagacagaaacattctcagaaacttctttatgacgtatgtactcaagtagcagagaagaactttccttttgacagagcatttttgatacattctttttctagtatctgcaagtggatatttggatagctgtgaagatttcgttggaaacgggaatatcttcctataaagtctggacagaagcattctcagtaaactgctctgtgatgtctgcattcaagtcacagagttgaacattgcctttcatagagcaggtttgaaacgctctttttgtagtatatggaagtggacgtttcggacggtttgaggcccatggtgataaagggaatatcttcccctacaagctagaaagaagcattctgtgaaacttgtttgtgatgtgtgtactcaactaacagagttgaacctttctttttacagagcagttttgaaacactctttttgtagaatctgcgaggggatatttggatagatttcaggatttctttggaaaggggaatatcttcatataaaatctcgacagaagcattctcagaaacttctttgtgatatgtgcattcaagtcacagagttgaatattccctttcacagagtaggtttgaaacactccttttgtagtatctggaagtggacatttggagcgccttgacgcctacggtgaaaagggaaatatcttctcataaaaagtagacagaagcaatctcagaatcttctttgggatatatgcacgcaggctaacagagttgaacctttctattgacagagcagttttgaaacagtctttctgtggaatctgcaagtggatatttggatagcttggaggatttcgttggaaacgggattacgtataaaaagtagacagcagcatcctcagaaacttctttgtgatgtgtgcattcaagtcacagagttgaacattccctttcgtacagcagttttcaaacactctttctgtagtatctggaagtgaacattaggacagctttcagctctatggtgagaaaggaaatatcttcaaataaaaacaagacagaagcattctcattaacttgtttgtgatgtgtgaactcagctaacacaggtggatctttcttttgatagagcagttctgaaaaacattttttgttgaatctgcaagtggacatttggatagatttgaagatttcgttggaaacgggaatatcttcatatcaaatctagacagaagcattctcagaaacgtctttgtgatgtttgcattcaacccatagagttgaacattccctttcagagagcagctttgaagcactctttttgtagtatgtgcaaggggatatttggagcgctctgtggcctaaggtgaaaaatcaaatatcttcccataaccactagacagaaacattctcagaaactcctttatgacgtatgcactcacctaacagagaagaaccttccttttgacagagcagttttgatacactctttttgtagaatctgcaagtggatatttggatagctgtgaagatttcgttggaaacgggaatatcttcttataaaatctagacagaagcattctcagaaactgctctgtgatgtctgcattcaagtcacagagttgaacattgcttttcctagagcaggtttgaaacgctctttttgtagtatatggaagtggacgtttcggacggtttgaggcccatggtgttaaagggaatatctttccctacaagctggaaagaagcattctgtgaaacttgtttgtgatgtgtgcactcaactaacagagcctttctttttacagagcagttttgaaacactctttttgtagaatctgcgaggggatatttggatagatttcaggatttcgttggaaacgggaatatcttcatataaaatctcgacagaaagcattctcagaaacttctttgtgatatgtgcattcaagtcacagagttgaatattccctttcacagagtaggtttgaaacactctttttgtagtatctggaagtggacatttggagcgccttgacgcctacggtgaaaagggaaatatcttcccataaaaactagacagaagcaatctcagaatcttctttgggatatatgcacgcagctaacagagttgaacctttctattgacagagcagttttgaaacactctttctgtggaatctgcaagtggatatttggagagcttggaggatttcgttggaaacgggattacgtataaaaagtagacagcagcatcctcagaaacttctttgtgatgtgcgcattcaagtcacagagttgaacattccctttcgtacagcagttttgaaacactctttctgtagtaactggaagtgaacattaggacagctttcaggtctatggtgagaaaggaaatatcttcaaataaaaactagacagaagcattctcataaacttgtttgtgatgtgtgaactcagctaacagaggtggatctttcttttgatagagcagttctgaaaaacactttttgttgaatctgcaagtggacatttggatagatttgaagatttcgttggaaccgggaatatcttcatatcaaatctagacagaagcattctcagaaacgtctttgtgatgtttgcattcaactcatagagttgaacattccgtttcagagagcagctttgaggcactctttttgtagtatgtgcaagtggatatttggagcgctctgaggcctacggggaaaaagcaaatatcttcccataaccactagacagaaacattctcagaaactcctttatgatgtatgcactcacctaacagagaagaaccttccttttgacagagcagttttgatgcactctttttgtagaatctgcaagtggatatttggatagctgtgaagatttcgttggaaacagggaatatcttcctataaaatctagacagaagcattctcagaaactgctctgtgatgtctgcattcaagtcacagagttgaacattgcctttcgtagagcaggtttgaaacgctctttttgtagtatatggaagtggatgtttcggacggttggaggcccatggtgataaagggaatatcttcccctacaagctagaaagaagcattctgtgaaacttgtttgtgatgtgtatactcaactaacagagttgaacctttctttttacagagcagtttagaaacactctttttgtagaatctgcgaggggatatttggatagatttcaggatttcgttggaaacgggaatatcttcatttaaaatctcgacagaagcattctcagaaacttctttgtgatatctgcattcaagtcacagagttgaatattccctttcacagagtaggtttgaaacactctttttgtagtatctggaagtggacatttggagcaccttgacacctacggtgaaaagggaaatatcttccgataaaaactagacagaagcaatctcagaatcttctttgggatatatgcacgcagctaacagagttgaacctttctattgacagagcagttttgaaacagtctttctgtggaatctgcaagtggatatttggatagcttggaggatttcgttggaaacgggattaagtataaaaggtagacagcagcatcctcagaaacttctttgtgatgtgtgcattcaagtcacagagttgaacattccctttcgtacagcagttttgaaacactctttctgtagtatctggaagtgaacattaggacagctttgaggtctatggtgagaaaggaaatatcttcaaataaaaactagacagaagcattctcataaacttgtttgtgatgtgtgaactcagctaacagaggtggatctttcttttgatagagcagttcggaaaaacactttttgttgaatctgcaagtggacatttggatagatttgaagatttcgttggaaacgggaataactttatatcaaatctagacagtagcattctcagaaacgtctttgtgatgtttgcattcaactcatagagttgaacattcccttccagagagcagctttgaagcactctttttctagcatctgcaagtggacatttggagcgcccttagtcctaaggggaaaaagcaaatatcttcccataaccactagacagaaacattctcagaaactcctttatgacgtatgcactcacctaacagaaaagaaccttccttttgacagagcagttttgatacactctttttgtagaatctgcaagtggatatttggatagctgtgaagacttcgttggaaacgggaatatcttcctataaaatctagacagaaagcattctcagaaactgctctgtgatgtctgcattcaagtcacagagttgaacattgcctttcctagagcaggtttgaaacgctctttttgtagtatatggaagtggacgtttcggacggtttgaggcccatggtgataaagggaatatcttcccctacaagctagaaagaagcattctgtgaaacttgtttgtgatgtgtgtactcaactaacagagttgaacctttctttttacagagcagttttgaaacactctttttgtagaatctgcgaggggatatttggagagatttcaggatttcgttggaaacgggaatatcttcatataaaatctagacagaagcattatcagaaacttctttgtgatatctgcctttaagtcacagagttgaatattccctttcacagagtaggtttgaaacactctttttgtagtatctggaagtggacatttggagcgccttgacacctacggtgaaaagggaaatatcttcccataaaaactagacagaagcaatctcagaatcttctttgggatatatgcacgcagctaacagagttgaacctttctattgacagagcagttttgaaacagtctttctgtggaatctgcaagtggatatttggatagcttggaggatttcgttggaaatgggattacgtataaaaagtagacagcagcatcctcagaaacttctttgtgatgtgtgcattcaagtcacagagttgaacattccctttcgtacagcagttttgaaacactctttctgtagtatctggaagtgaacattaggacagctttcaggtctatggtgagaatggaaatatattcaaataaaaactagacagaagcattctgataaacttgtttgtgaagtgtgaactcagctaacggaggtggatctttcttttgatagagcagttctgaaaaacactttttgttgaatctgcaagtggacatttggatagatttgaagatttcgttggaaacgggaatatcttcatatcaaatctagacagaagcattctcagaaacgtctttgtgatgttggcattcaactcatagagttgaagattccctttcagagagcagctttgaagcactctttttgtagtatgtgcaaggggatatttggagcgctctgaggcctaaggtgaaaaagcaaatatcttcccataaccactagacagaaacattctcagaaactcctttatgacgtatgcactcacctaacagagaagaaccttccttttgacagagcagttttgatacactctttttgtagaatctgcgaggggatatttggatagctgtgaagatttcgttggaaacgggaatatcttcctataaaatctagacagaagcattctcagaaactgctctgtgatgtctgcattcaagtcacagagttgaacattgcctttcctagagcaggtttgaaacgctctttttgtagtatatggaagtggacgtttcggacggttggaggcccatggtgataaagggaatatcttcccctacaagctagaaagaagcattctgtgaaacttgtttgtgatgtgtgtactcaagtaacagagttgaacctttctttttacagagcagttttgaaacactctttctgtagaatctgcgaggggatatttggatagatttcaggatttcgttggaaacgggaatatcttcagataaaatctcgacagaagcattctcagaaacttctttgtgatatgtgcattcaagtcacagagttgaatattccctttcacagagaaggtttgaagcactctttttgtaatatctggaagtggacatttggagcgccttgacgcctacggtgaaaagggaaatatcttcccataaaaactagacagaagcaatctcagaatcttctttgggatatatgcacgcagctaacagagttgaacctttccattgacagagcagttttgaaacagtctttctgtggaatctgcaagtggatatttggatagcttggaggatttcgttggaaacgggattacgtataaaaagtagacagcagcatcctcagaaacttctttgtgatgtgtgcattcaagtcacagagttgaatattccctttcgtacagcagttttgaaacactctttctgtgaaacactcatctggaagtgaacattaggacagctttcaggtctatggtgagaaaggaaatatcttcaaataaaaactagacagaagcattctcataaacttgtttgtgatgtgtgaactcagataacagaggtggatctttcttttgatagagcagttctgaaaaacactttttgttgaatctgcaagtggacatttggatagatttgaagatttcgttggaaacgggaatatcttcatatcaaatctagacagaagcattctcggaaacgtctttgtgatgtttgcattcaactcatagagttgaacattccgtttcagagagcagctttgaagcactctttttgtagtatgtgcaagtggatatttggagcgctctgaggcctacggtggaaaagcaaatatcttcccataaccactagacagaaacattctcagaaactcctttatgacgtatgtactcaactaacggagaagaaccttccttttgacagagcatttttgatacactctttttgtagaatctgcaagtggatatttggatagctgtgaagatttcattggaaacgggaatatcttcctataaaatctagacagaagcattctcagaaactgctctgtgatgtctgcattcaagtcacagagttgaacattgcctttcttagagcaggtttgaaacgctctttttgtagtatatggaagtggatgtttcggacggttggaggcccatggtgataaagggaatatcttcccctacaagctagaaagaagcattctgtgaaacttgtttgtgatgtgtgtactcaactaacagagttgaacctttcttttcacagagcagttttgaaacactctttttgtagaatctgcaaggggatatttggatagatttcaggatttcgttggaaacgggaatatcttcatataaaatctcgacagaatcattctcagaaacttctttgtgatatctgcattcaagtcacagagttgaatattgcctttcacagagtaggtttgaaacactctttttgtagtatctggaagtggacatttggagcgccttgacacctacggtgaaaagggaaatatcttcccataaaaactagacagaagcaatctcagaatcttctttgggatatatgcacgcagctcacagagttgaacctttctattgacagagcagttttgaaacagtctttctgtggaatctgcaagtggatatttggatagcttggaggatttcgttggaaacgggattacgtataaaaagtagacagcagcatcctcagaaacttctttgtgatgtgtgcattcaagtcacagagttgaacattccctttcgtacagcagttttgaaacactctttctgtagtatctggaagtgaacattaggacaggtttcaggtctatggtgagaaaggaaatatcttcaaataaaaactagacagaagcattctcataaacttgttcgtgatgtgtgaactcagctaacacacgtggatctttcttttgatagagcagttctgaaaaacactttttgttgaatctgcaagaggacatttggatagatttgaagatttctttggaaacgggaatatcttcatatcaaatctagacagaagcattctcagaaacgtctttgtgatgtttgcattcaactcatagagttgaacattccgtttcagagagcagctttgaagcactctttttgtagtatgtgcaagtggatatttggagcgctctgagtcctacggggaaaaaacaaatatcttcccataaccactagactgaaacattctcagaaactcctttatgacgtatgcactcacctaacagagaagaaccttccttttggcagagcagttttgatacactctttttgtagaatctgcaagtggatatttggatagctgtgaaggtttcgttggaaacgggaatatcttcctataaaatctagacagaagcattctcagaaactgctctgtgatgtctgcattcaagtcacagagttgaacattccctttcctagagcaggtttgaaacgctctttttgtagtatattgaagtggacctttcggatggtttgaggcccatggtgataaagggaatatcttcccctacaagctagaaagaagcattctgtgaaacttgtttgtgatgtgtgtactcaactaacagagttgaacctttctttttacagagcagttttgaaacactctttttgtagaatctgtgaggggatatttggatagatttgaggatttcgttgggaacgggaatatcttcatataaaatctcgacagaagcattctcagaaacttctttgtgatatctgcctttaagtcacagagttgaatattccctttcatagagtaggtttgaaacactctttttgtagtatctggaagtggacatttggagcgccttgacacctacggtgaaaagggaaatatcttcccataaaaactagacagaagcaatctcagaatcttctttgggatatatgcacgcagttaacagagttgaacctttctattgacagagcagttttgaaacagtctttctgtggaatctgcaagtggatatttggatagcttggaggatttcgttggaaacgggattacgtataaaacgtagacagcagcatcctcagaaacttctttctgatgtgtgcattcaagtcacagagttgaacattccctttcgtacagcagttttgaaacactctttctgtagtatctggaagtgaacattaggacagctttcaggtctatggtgagaaaggaaatatcttcaaataaaaactagacagaagcattctcataaagttgtttgtgaggtgtgaactcagctaacagaggtggatctttcttttgatagagcagttctgaaaaacactttttgttgaatctgcaagtggacatttggatagatttgaagatttcgttggaaacgggaatatcttcatatcaaatctagacagaagcattctcagaaacgtctttgtgttgtttgcattcaactcatagagttgaacattccctttcagagagcagctttgaagcactctttttgtagcatgtgcaagtggacatttggagcgctctgaggcctacggggaaaaagcaaatatcttcccataaccactagacagaaacattctcagaaacttctttataacgtatgtactcaactagcagagaagaactttccttttgacagagcatttttgatacactcttttgtagtatctgcaagtggatatttggatagctgtgaagatttcgttggaaacgggaatatcttcctataaagtctggacagaagcattctcagaaactgctctgtgatgtctgcattcaagtcacagagttgaacattgcctttcctagagcaggtttgaaacgctctttttgtagtatatggaaggtggacgtttcggacggtttgaggcccatggtgataaagggaatatcttcccctacaagctagaaagaagcattctctgaaacttgtttgtgatgtgtgtactcaactaacagagttgaacctttctttttacagagcagttttgaaacactctttttgtagaatctgcgaggggatatttggatagatttcaggatttcgttggaaacgggaatatcttcatataaaatctcgacagaagcattctcagaaacttctttgtgatatctgcattccagtcacagagttgaatattctctttcacagagtagttttgaaacactctttttatagtatctggaattggacatttggagcgccttgacgcctacggtgaaaagggaaatatcttcccataaaaactagacagaagcaatctcagaatcttctttgggatatatgtacgcagctaacagtagttgaacctttctattgacagacccgttttgaaacagtctttctgtggaatctgcaagtggatatttggatagcttggaggatttctttggaaacgggattacgtataaaaagtagacagcagcatcctcagaaacttctttgtgatgtgtgcattcaagtcacagagttgaacattccctttcgtacagcagttttgaaacactctttctgtagtatctggaagtgaacattaggacagctttcaggtctatggtgagaaaggaaagatcttcaaataaaaactagacagaagctttctcataaacttgtttgtgatgtgtgaactcagctaacagaggtggatctttcttttgatacagcagttttgaaaaacactttttgttgaatctgcaagtggacatttggatagatttgaagatttcgttggaaacgggaatatcttcatatcaaatctagacagaagcattctcagaaacgtctttgtgatgtttgcattcaacccatagagttgaacattccgtttcagagagcagctttgaggcactctttttgtagtatgtgcaagtggatatttggtgcgctgtgaggcctacggtgaaaaagcaaatatcttcccataaccactagacagaaacattctcagaaactcctttatgacgtatgcactcacctaacagagaagaaccttccttttgacagagcagttttgatacactctttttgtagaatctgcaagtggatatttggatagctgtgaagatttcgtaggaaacgggaatatcttcctataaaatctagacagaagcattctcagaaactactctgtgatgtctgcattcaagtcacagagttgaacattgcctttcctagagcaggtttgaaacgctctttttgtagtatatggaagtggacgtttcggacgctttgaggcccatggtgataaagggaatatcttcccctacaagctagaaagaagcattctgtgaaacttgtttgtgatgtgtgtactcaactaacagagttgaaccttcctttttagagagcagttttgaaacactctttttgtagaatctgcgaggggatatttggatagatttcaggatttcgttggaaacgggaatatcttcatataaaatctcgacagaagcattctcagaaacttccttgtgatatgtgcattcaagtcacagagttgaatattccctttcacagagtaggtttgaaacactctttttgtagtatctggaagtggacatttggagcgccttgacgcccacggtgaaaagggaaatatcttcccatcaaaactagacagaagcaatctcagaatcttctttgggatatatgcacgcagctaacagagttgaacctttctattgacagagcagttttgaaacagtctttctgtggaatctgcaagtggatatttggatagcttggaggatttcgttggaaacgggattacgcataaaaagtagacagcagcgtcctcaggaacttctttgtgatgtgtgcattcaagtcacagagttgaacattcccttccgtacagcagttttgaaacactctttctgtagtatctggaagtgaacattaggacagctttcaggtctatggtgagaaaggaaatatcttcaaataaaaactagacagaagcattctcataaacttgtttgtgatgtgtgaactcatctaacagaggtggatctttcttttgatagagcagttctgaaaaacactttttgttgaatctgcaagtggacatttggatagatttgaagatttcgttggaaacgggaatatcttcatatcaaatctagacagaagcattctcggaaacgtctttgtgatgtttgcattcaactcatagagttgaacattacgtttcagagagcagctttgaagcactctttttgtagtatgtgcaagtggatatttggagcgctctgaggcctacggtgaaaaagcaaatatcttcccataaccactagacagaaacattctcagaaactcctttatgacgtatgcactcacctaacggagaagaaccttccttttgacagagcacttttgatacactctttttgtagaatctgcaagtggatatttggatagctgtgaagatttcgttggaaacgggaatatcttcttataaattctagacagaagcattctcagaaactgctctgtgatgtctgcattcaagtcacagagttgaacattgcctttcatagagcaggtttgaaatgctctttttgtagtatatggaactggatgtttcggaaggttggaggcccatggtgataaagggaatatcttcccctacaagctaaaaagaagcattctgtgaaacttgtttgtgatgtgtgtactcaactaacagagttgaacctttctttttacagagcagttttgaaacactctttttgtagaatctgcgaggggataattggatagatttcaggatttcgttggaaacgggaatatcttcatataaaatctcgacagaagcattctcagaaacttctttgtgatatgtgcattcaagtcacagagttgaatattccctttcacagagtaggtttgaaacactctttttgtagtatctggaagttgacatttggagcgccttgacacctacggtgaaaagggaaatatcttcccataaaaactagacagaagcaatctcagaatcttctttgggatatatgcacgcagctaatagagttgaacttttctattgacagagcagatttgaaacagtctttctgtggaatctgcaagtggatatttggatagcctggaggattacgttggaaacgggattacgtataaaaagtagacagcagcatcctcagaaacttctttgtgatgtgtgcattcaagtcacagagttgaacattccctttcgtacagcagtttcgaaacactctttctgtagtatctggaagtgaacattaggacagctttcaggtctatggtgagaaaggaaatatcttcaaataaaaactagacagaagaattctgataaacttgtttgtgaagtgtgaactcagataacacaagtggatctttcttttgatacagcagttttgaaaaacactttgttgaatctgcaagtggacatttggatagatttgaagatttcgttggaaacgggtatatcttcataacaaatctagacagaagcattctcagaaacgtctttgtcatgtttgcattcaactcatagagttgaacattccgtttcagagagcagctttgaaacactctttttgtagtatgtgcaagtggatatttggagcgctctgaggcctacggtgaaaaagcaaatatcttcccataaccactagacagaaacattctcagaaactcctttatgacgtatgcactcacctaacagagaagaaccttccttttgacagagcagttttgatacactctttttgtagaatctgcaagtggatatttggatagctgtgaagatttcgttgcaaacgggaatatcttcctataaaatctagacagaagcattctcagaaactgctctgtgatgtctgcattcaagtcacagagttgaacattgcctttcatagagcaggtttgaaacgctctttttgtagtatatggaagtggacgtttcggacggtttgaggcccatggtgttaaagggaatatctcccctacaagctagaaagaagcattctgtgaaacttgtttgtgatgtgtgtactcaactaatagagttgaacctttctttttacagagcagttttgaaacactctttttgtagaatctgcgaggggatatttggatagatttcaggatttcgttggaaacgggaatatcttcatagaaaatctcgatagaagcattctcagaaacttctttgtgatatctgcattcaaatcacagagttgaatattccctttcacagagtaggtttgaaacactctttttgtagtatctggaagtggacatttggagcgctttgacgcctacggtgaaaagggaaatatcttcccataaaaactagacagaagcaatctcagaatcttctttgggatatatgcacgcagctaacagagttgaacctttctattgacagagcagttttgaaacagtctttctgtggaatctgcaagtggatattggatagcttggaggatttcgttggaaacgggattacgtataaaaagtagaacagcagcatcctcagaaacttctttgtgatgtgtgcattcaagtcacagagttgaacattccctttcgtacagcagttttgaaacactctttctgtagtatctggaagtgaacattaggacagctttcaggtctatggtgagaaaagaaatatcttcaaataaaaaccagacagaaacattctcataaacttgtttgtgatgtgtgaactcagctaacacaggtggatctttcttttgatagagcagttctgaaaaacactttttgttgaatctgcaagtggacatttggatagatttgaagatttcgttggaaactggaatatcgtcatatcaaatctagacagaagcattctcggaaacgtctttgtcatgtttgcattcaactcatagagttgaacattccgtttcagagagcagctttgaagcactctttttatagtatctgcaaggggatatttggagtgctctgaggcctaaggtgaaaaagcaaatatcttcccataaccactagacagaaacattctcagaaactcctttatgacgtatgtactcaactaacagagaagaaccttccttttgacagagcagtttgaatacactctttttgtagaatctgcaagtggatatttggatagctgtgaagatttcgttggaaacgggaatatcttcctataaaatctatacagaagcattctcagcaaactgctctgtgatgtctgcattcaagtcacagagttgaacattgcttttcatagagcaggtttgaaacgctctttttgtagtatatggaagtagacgtttcggacggtttgaggcccatggtgataaacggaatatcttcccctacaagctagaaagaagcattgtgtgaaacttgtttgtgatgtgtgtactcaattaacagagctgaacctttctttttacagagcagttttgaaacactctttttgtagaatctgcgaggggatatttggatacatttcagaatttcgttggaaacgggaatatcttcatataaaatctcgacagaagcattctcagaaacttctttgtgatatgtgcattcaagtcacagagttgaatattccctttcacagagtaggtttgaaacactctttttgtagtatctggaagtggatatttggagcgccttgacacctacggtgaaaagggaaatatcttcccataaaaactagacagaaagcaatctcagaatcttctttgggatatatgcacgcagctaacagagttgaacctttctattgacagagcaggtttgaaacagtctttctgtggaatctgcaagtggatatttggatagcttggaggatttcgttggaaacgggattacgtataaaaagtagacagcagcatcctcagaaacttctttgtgatgtgtgcattcaagtcacagagttgaacattccctttcgtacagcagttttgaaacactctttctgtagtatctggaattgaacattaggacagctttcaggtctatggtgagaaaggaaatatcttcaaataaaaactagacagaagcattctgataaacttgtttgtgaagtgtgaactcagctaacagaggtggatgtttcttttgatacagcagttttgaaaaacactttgttgaatctgcaagtggacatttggatagatttgaagatttcgttggaaacgggaatatcttcatatcaaatctagacagaagcattctcagaaacgtctttgtgatgtttgcattcaactcatagggttgaacattccctttcagagagcagctttgaagcactctttttgtagcatgtgcaagtggacatttggagcgccctgaggcctacggggaaaaagcaaatatcttcccataaccactagacagaaacattctcagaaatttctttatgacgaatgtactcaactagcagagaagagctttccttttgacagagcatttttgatacacttttttagtatctgcaagtggatatttgaatagctgtgaagatttcgttggaaacgggaatatcttcctataaactctggacagaagcattctcagaaactgctctgtgatgtctgcattcaagtcacagagttgaacattgccgttcatagagcaggtttgaaacactctttttgtagtatatggaagtggacgtttcggacggtttgaggcccatggtgataaagggaatatcttcccctacaagctagaaagaagcattctgtgaaacttgtttgtgatgtgtgtactcaactaacagagttgaacctttctttttacagagcagttttgaaacactctttttgtagaatctgcgagggcatatttggatagatttcagaatttcgttggaaaggggattatcttcatataaaatctcgacagaagcattctcagaaacttctttgtgatatctccattcaagtcacagagttgaatattccctttcacagagtaggtttgaaacactctttttgtagtatctggaagtggacatttggagcgccttgacgcctacggtgaaaagggaaatatcttcccataaaaactagacagaagcaatctcagaatcttctttgggatatatgcacgcagctaacagagttgaacctttctattgacagagcagttttgaaacagtctttctgtggaatctgcaagtggatatttggatagattggaggatttcgttggaaacgggattatgtataaaaagtagacagcagcatcctcagaaacttatttgtgatgtgtgcattcaagtcacagagttgaacattccctttcatacagcagttttgaaacactctttctgtagtatctggaagtgaacattaggacagctttcaggtctatggtgagaaaggaaatatcttcaaataaaaactagacagaagcattctcataaacttgttcgtgatgtgtgaactcagctaacacacgtggatctttcttttgatagagcagttctgaaaaacactttttgttgaatctgcaagaggacagttggatagatttgaaggtttcgttggaaacgggaatatcttcatatcaaatctagacagaagcattctcagaaacgtctttgcgatgtttgcattcaactcatagagttgcacattccgtttcagagagcagctttgaggcactctttttgtagtatgtgcaagtggatatttggagcgctctgaggcctacggtgaaaaagcaaatatcttcccataaccactagacagaaacattctcagaaactcctttatgacgtatgtactcaactaacagagaagaaccttccttttgacagagcatttttgatacactctttttgtagaatctgcaagtggatatttggatagctgtgaagatttcgttggaaacgggaatatcttcctataaaatctagacagaagcattctcagaaactgctctgtgatgtctgcattcaagtcacggagttgaacattgcctttcatagagcaggtttgaaacgctctttttgtagtatatggaagtggacttatcggacggtttgaggcccatggtgataaagggaatatcttcccctacaagctagaaagaagcattctgtgaaacttgtttgtgatgtgtgtactcaactaacagagttgaacctttcttttcacagagcagttttgaaacactctttttgtagaatctgcgagcggatatttggatagatttcaggatttcgttggaaacgggaatatcttcatataaaatctcgacggaagcattctcagaaacttccttctgatatgtgcattcaagtcacagagttgaatattccctttcacagagtaggtttgaaacactcgttttgtagtatctggaagtggacatttggagcgccttgacgcctacggtgaaaagggaaatatcttcccataaaaactagacagaagcaatctcagaatcttctttgggatatatgcacgcagctaacagagttgaacctttctattgacagagcagttttgaaacagtctttctgtggaatctggaagtggatatttggatagcttggaggatttcgttggaaacgggattacgtataaaaagtagacagcagcatcctcagaaacttctttgtgatgtgtgcattcaagtcacagagttgaacattccctttcgtacagcagtttttaaacactctttctgtagtatctggaagtgaacattaggacagctttcaggtctatggtgagaaaggaaatatcttcaaataaaaactagacagaagcattctcataaacatgtttgcgatgtctgaactcagctaacagaggtggatctttcttttgatagagcagttctgaaaaacactttttgttgaatctgcaagtggacatttggatagatttgaagatttcgttggaaacgggaatatcttcatatcaaatctagacagaagcattctcagaaacgtctttgcgatgtttgcattcaactcatagagttgaacattccgtttcagagagcagctttgaggcactctttttgtagtatgtgcaagtggatatttggagcgctctgaggccttcggtgaaaaagcaaatatcttcccataaccactagatggaaacattctcagaaactcctttatgacggtatgtactcacctaacagagaagaaccttccttttgacagagcagttttgatacactctttttgtagaatctgcaagtggatatttggatagctgtgaagatttcgttggaaacgggaatatcttcctataaaatctagacagaagcattctcagaaactgctctgtgatgtctgcattcaagtcacagagttgaacattgcctttcatagagcaggtttgaaacgctctttttgtagtatatggaagtggacttatcggacggtttgaggcccattgtgataaagggaatatcttcccctacaagctagaaagaagcattctgtgaaacttgtttgtgatgtgtgtactcaactaacagagttgaacctttctttttacagagcagttttgaaacactctttttgtagaatctgcgaggggatatttggagagatttcaggatttcgttggaaacgggaatatcttcatataaattctcgacagaagcattctcagaaacttccttgtgatatgtgcattcaagtcacagagttgaatattccctttcacagagtaggtttgaaacactctttttgtagtatctggaagtggacatttggagcgccttgacgcctacggtgaaaaaggaaatatcttcccataaaaactagacagaagccatctcagaatcttcttgggatatatgcacgcagctaacagagttgaacctttctattgacagagcagttttgaaacagtctttctgtggaatctgcaagtggatatttggatagcttggaggatttcgttggaaacgggattacgtataaaaagtagacagcagcatcctcagaaacttctttgtgatgtgtgcattcaagtcacagagttgaacattccgtttcgtacattagttttgaaacactctttctgtagtatctggaagtaaacattacgacagctttcaggtctatggtgagaaaagaaatatcttcaaataaaaactagacagaagcattctcataaacttgtttgtgatgtgtgaactcagctaacagaggtggatctttcttttgatagagcagttctgaaaaactctttttgttgaatctgcaagtggacatttggatagatttgaagatttcgttggaaacgggaatatcttcatatcaaatctagacagaggcattctcagaaacgtctttgtgatgtttgcattcaactcatagagttgaacattccgtttcagagagcagctttgaggcactctttttgtagtatgtgcaagtggatatttggagcgctctgaggcctacggtgaaaaagcaaatatcttcccataaccactagacagaaacattctcagaaactcctttatgacgtatgcactcacctaacagaaaggaaccttccttttgacagagcagttttgatacactctttttgtagaatctgcaagtggatatttggatagctgtgaagatttcgttggaaacgggaatatcttcctataaaatctagacagaagcattctcagaaactgctctgtgatgtctgcattcaagtcacagagttgaacattgcctttcatagagcaggtttgaaacgctctttttgtagtatatggaagtggacttttcggacggtttgaggcccatggtgataaagggtatatcttcccctacaagctagaaagaagcattctgtgaaacttgtttgtgatgtgtgtactcaactaacagagttgaacctttctttttacagagcagttttgaaacacgctttttgtagaatctgcgaggggatatttggatagatttcaggatttcgttggaaaggggaatatcttcatataaaatctcgacagaagcattctcagaaacttctttgtgatatgtgcattcaagtcacagagttgaatgttccctttcacagagtaggtttgaaacactctttttgtagtatctggaagtggacatttggagcgccttgacacctacggtgaaaagggaaatatcttcccataaaaactagacagaagcaatctcagaatcttctttgggatatatgcacgcagctaacagagttgaacctttctattgacagagcagttttgaaacagtctttctgtggaatctgcaagtggatatttggatagcttggaggatttcgttggaaacgggattaggtataaaagtagacagcaagcattctcataaacttgtttgtgatgtgtgaactcaactaacacacgtggatctttcttttgatagagcagttctgaaaaacactttttgttgaatctgcaagtggacatttggatagatttgaagatttcgttggaaacgggaatatcttcatatcaaatctagacagaagcattctcataaacttgtttgtgatgtgtgaactcagctaacacacgtggatctttcttttgatagagcagttctgaaaaacactttttgttgaatctgcaagtggacatttggatagatttgaagatttctttggaaacgggaatatcttcatatcaaatctagacagaagcattctcagaaacgtctttgtgatgtttgcattcaactcttagagttgaacattccctttcagagagcagctttgaagcactctttttgtagtatgtgcaaggggatatttggagcgctctgaggcctacggtgaaaaagcaaatatcttcccataaccactagacagaaacattctcagaaacttctttatgacgtatgtactcaactagcagagaagaactttccttttgatagagcatttttgatacactctttttgtactatctgcaagtggatatttggatagctgtgaagatttcgttggaaacgggaatatcttcctataaagtctggacagaagcattctcagaaactgctctgtgatgtctgcattcaagtcacagagttgaacattgcctttcatagagcaggtttgaaatgctctttttgtagtatatggaagtggacttttcggacggtttgaggcccatggtgataaagggaatatcttcccctacaagctagaaagaagcattctgtgaaacttgtttgtgatgtgtgtactcaactaacagagttgaacctttctttttacagagcagttttgaaacactctttttgtagaatctgcgaggggatatttggatagatttcaggatttcgttggaaaggggaatatcttcatataaaatcgcgacagaagcattctcagaaacttccttgtgatatgtgcattcaagtcacagagttgaatattccctttcacagagtaggtttgaaacactctttttgtagtatctggaagtggacatttggagcgccttgacgcctacggtgaaaagggaaatatcttcccatcaaaactagacagaagaaatctcagaatcatctttgggatatatgcacgcagctaacagagttgaacctttctattgacagagcagatttgaaacagtctttctgtggaatctgcaagtggatatttggatagcttggaggatttcgttggaaacgggattacgtataaaaagtagacagcagcatcctcagaaacttctttgtgatgtgtgcattcaagtcaaagagttgaacattccctttcgtacagcagttttgaaacactctttctgtagtatctggaagtgaacattaggacagctttcaggtctatggtgagaaaggaaatatcttcaaataaaaactagacagaagcattctcataaacttgtttgtgttgtgtgaactcagctaacagaggtggatctttcttttgatagagcagttctgaaaaacactttttgttgaatctgcaagtggacatttggatagatttgaagatttcgttggaaacgggaatatcttcatatcaaatctagacagaagcattctcagaaacgtctttgtgatgtttgcattcaactcatagagttgaacattccctttcagagaggcagctttgaagcactctttttgtagcatgtgcaagtggacatttggagcgccctgaggcctacggggaaaaagcaaatatcttcccataaccactagacagaaacattctcagaaactcctttatgacgtttgtactcaactaacagagaagaaccttccttttgacagagcagttttgatacactctttttgtagaatctgcaagtggatatttggatagctgtgaagatttcgttggaatcgggaatatcttcctataaaatctagacagaagcattctcagaaactgctctgtgatgtctgcattcaagtcacagagttgaacattgcctttcatagagcaggtttgaaacgcttttttgtagtatatggaagtggatgtttcggacggttggaggcccatggtgataaagggaatatcttcccctacaagctagaaagaagcattctgtgaaacttgtttgtgatgtgtgtactcaactaacagagttgaacctttctttttacagagcagttttgaaacactctttttgtagaatctgcgaggggatatttggatagatttcaggattttgttggaaaccggaatatcttcatataaaatctcgacagaagcattctcagaagcttctttgtgatatgtgcattcaagtcacagagttgaatattccctttcacagagtaggtttgaaacactctttttctagtatctggaagtggacatttagagcgccttgacgcctacggtgaaaagggaaatatcttctcataaaaagtagacagaagcaatctcagaatcttctttgggatatatgtacgcagctaacagagttgaacctttctattgacagagcagttttgaaacagtctttctgtggaatctgcaagtggatatttggatagcttggaggatttcgttggaaacgggattacgtataaaaagtagacagcagcattctcagaaactgctctgtgatgtctgcattcaagtcacagagttgaacattccctttcatacagcagttttgaaacactctttctgtagtatctggaagtgaacattaggacagctttcaggtctatggtgagaaaggaaatatcttcaaataaaaactagacagaagcattctcttaaacttgtttgtgatgtgtgaactcagctaacagatgtggatctttcttttgatataacagttttgaaaaactctttttgttgaatctgcaaatggacatttggatagatttgaagatttcgttggaaacgggaatatcttcatatcaaatctagacagaaagcattgtcagaaacgtctttgtgatgtttgcattcaactcacagagttgaacattccctttcagagagcagctttgaagcactctttttgtagtatgtgcaagtggatatttggagctctctgaggcctaaggtgaaaaagcaaatatcttcccataaccactagacagaaacattctcagaaactcctttatgacgtatgcactcacctaacagagaagaaccttccttttcacagagcagttttgatacactctttttgtagaatctgcaagtggatatttggatagctgtgaagatttcgttggaaacgaggaatatcttcctataaaatctagacagaagcattctcagaaactgctctgtgatgtctgcattcaagtcacagagttgaacattgcctttcctagagcaggtttgaaatgctgtttttgtagtatatggaagtggacgtttcggacggtttgaggcccttggtgataaagggaatatcttcccctacaagctagaaagaagcattctgtgaaacttgtttgtgatgtgtgtactcaactaacagagttgaacctttctttttacagagcagttttgaaacactctttttgtacaatctgcgaggggatatttggatagatttcaggatttcgttggaaacgggaatatcttcatataaaatctcgacagaagcattctcagaaacttctttgtgatatgtgcattcaagtcacagagttgaatattcccttttacagagtaggtttgaaacactctttttgtagtatctggaagtgaacatttggagcgccttgacgcctacggtgaacagggaaatatcttctcataaaaagtagacagaagcaatctcagaatcttctttgggatatatgtacgcagctaacagagttgaacctttctattgacagacccgttttgaaacagtctttctgtggaatctgcaagtggatatttggatagcttggaggatttctttggaaacgggattacgtataaaaagtagacagcagcatcctcagcaaacttctttgtgatgtgtgcattcaagtcacagagttgaacattccctttcgtacagcagttttgaaatactctttctgtagtaactggaagtgaacattaggacagctttcaggtctatggtgagaaaggaaatatcttcaaataaaaactagacagaagcattctcataaacttgtttgtgatgtgtgaactcagctaacacacgtggatttttcttttgatagagcagttctgaaaaacaatttttgtagaatctgcaagtggacatttggatagatttgaagatttccttggaaacgggaatatcttcatatcaaatctagacagaagcattctcagaaacgtctttgtcatgtttgcattcaactcatagagttgaacattccgtttcagagagcagctttgaagcactctttttgtagtatgtgcaagcggatatttggagcgctctgaggcctacggtgaaaaagcaaatatcttcccataaccactagacagaaacattctcagaaactcctttatgacgtatgcactcacctaacagagaagaaccttccttttgacagagcagttttgatacactctttttgtagaatctgcaagtggatattttgatacctgtgaagatttcgttggaaacgggaatatcttcctataaaatctagacagaagcattctcagaaactgctctgcgatgtctgcattcaagtcacagagttgaacattgcctttcctagagcaggtttgaaatgctctttttgtagtatatggaagtggacgtttcggacggtttgaggcccatggtgataaagggaatatcttcccctacaagctagaaagaagcattctgtgaaacttgtttgtgaggtgtgtactcaactaacagagttgaacctttctttttacagagcagttttgaaacactctttttgtagaatctgcgaggggatatttggatagattacaggatttcgttggaaacgggaatatcttcatataaaatctcgacagaagcattctcagaaacttctttgtgatatctgccttcaagtcacagggttgaatattccctttcacagagtaggtttgaaacactctttttgtagtatctggaagtggacatttggagcgccttgacgcctacggtgaaaagggaaatatcttcccataaaaactagacagaagcaatctcagaatcttctttgggatatatgcacgcagctaacagagttgaacctttctattgacagagcagttttgaaacagtctttctgtggaatctgcaagtggatatttggtagcttggaggatttcgttggaaacgggattacgtatcaaaagtagacagcagcatcctcagaaacttctttgtgatgtgtgcattcaagtcacagagttgaacattccctttcgtacagcagttttgaaacactctttctgtagtatctggaagtgaacattaggacagcttcaggtctatggtgagaaaggaaatatcttcaaataaaaactagacagaaagcattctcattaacttgtttgtgatgtgtgaactcagctaacagaggtggatctttcttttgatagagcagttctgaaaaacattttttgttgaatctgcaagtggacatttggatagatttgaagatttcgttggaaacgggaatatcttcatatcaaatctagacagaagcattctcagaaacgtctttgtcatgtttgcattcaactcatagagttgaacattccctttcagagagcaggtttgaagcactctttttgtagtatgtgcaagtggatatttggagcgctctgaggcctacggtgaaaaagcaaatatcttcccataaccactagacagaaacattctcagaaactcctttatgacgtatgcactcacctaacagagaagaaccttccttttgacagagcagttttgatacactctttttgtagaatctgcaagtggatatttggatagctgtgaagatttcgttggaaacgggaatatcctcctataatacctagacagaagcattctcagaaactgctctgtgatgtctgcattcaagtcacagagttgaacattgcctttcatagagcaggtttgaaatgctctttttgtagtatatggaagtggacgtttcagactgtttgaggcccatggtgataaagggaatatcttcccctacaagctagaaagatagcattctgtgaaacttgtttgtgatgtgtgtactcaactaacagagttgaacctttctttttacagagcagttttgaaacactctttttgtagaatctgcgaggggatatttggatagatttcaggatttcattggaaacgggaatatcttcatataaaatctcgacagaagcattctcagaagcttctttttgatatgtgcattcaagtcacagagttcaatattccctttcacagagtaggtttgaaacactctttttgtagtatctggaagtggacatttggagcgccttgacgcctacggtgaaaagggaaatatcttctcataaaaacgtagacagaagtaatctcagaatcttctttgggatatatgcacccagctaacagagttgaacctttctattgacagagcagttttgaaacagtctttctgtggaatctgcaagtggatatttggatagcttggaggatttcgttggaaacgggattacgtataaaaagtagacagcagcatcctcagaagcttctttgtgatgtgtgcattcaagtcacagagttgaacattccctttcgtacagcagttttgaaacactctttctgtagtaactggaagtgaacattaggacagctttcaggtctatggtgagaaaggaaatatcttcaaataaaaactagacagaagcattctcataaacttgtttgtgatgtgtgaactcagctaacagaggtggatctttcttttgatagagcagttctgaaaaacacttttgttgaatctgcaagtggacatttggatagatttgaagatttcgttggaaacgggaatatcttcatatcaaatctagacagaagcattcccagaaacgtctttgtgatgtttgcattcaactcatagagttgaacattccgtttcagagagcagctttgaagcactctttttgtagtatgtgcaaggggatatttggagcgctctgaggcctacggtgaaaaagcaagtatcttcccataaccactagacagaaacattctcagaaactcctttatgacgtatgcactcacctaacagagaagaaccttccttttgacagagcacttttgatacactctttttgtagaatctgcaagtggatatttggatagctgtgaagatttcgttggaaacgggaatatcttcctataaaatctagacagaaagcattctcagaaactgctctgtgatgtctgcattcaagtcacagagttgaacattgcctttcatagagcaggtttgaaacgctctttttgtagtatatgtaagtggatgtttcggacggttggaggcccatggtgataaagggaatatcttcccctacaagctagaaagagcattctgtgaaacttgtttgtgatgtgtgtactcaactaacagagttgaacctttctttttacagagcagttttgaaacactctttttgtagaatctgcgagcggatatttggatagatttcagcatttcgttggaaacgggaatatcttcatataaaatctcgacagatgcattctcagaaacttctttgtgatatgtgcattctagtcacagagttgaatattccctttcacagagtaggtttgaaacactctttttgtagtatctggaagtggacatttggagcgccttgacgcctacggtgaaaagggaaatatcttcccataaaaactagacagaagcaatctcagaatcttctttgggatatatgcacgcagctaacagagttgaacctttctattgacagaacagttttgaaagagtctttctgtggaatctgcaagtggatatttggatagcttggaggatttcgttggaaacgggattacgtataataagtagacagcagcatcctcagaaactactttgtgatgtgtgcattcaagtcacagagttgaacattccctttcgtacatcagttttgaaacactctttctgtagtatctggaagtgaacactaggacagctttcaggtctatggtgagaaaggaaatatcttcaaataaaaactagacagaagcattctcataaacttgtttgtgatgtgtgaactcagctaacagaagtggatctttcttttgatagagcagttctgaaaaacactttttgttgaatctgcaagtggacatttggatagatttgaagatttcccttggaaacgggaatatcttcatatcaaatctagacagaagcattctcagaaaacgtctttgtgatgtttgcattcaactcatagagttgaacattccgtttcagagaccagctttgaagcactctttttgtagtatgtgcaagtggatatttggagcgctctgaggcctacggtgaaaaagcaaatatcttcccataaccactagacagaaacattctcagaaacacctttaaacgtatgcactcacctaacagagaagaaccttccttttgacagagcagttttgatacactctttttgtagaatctgcaagtggatatttggatagctgtgaagatttcgttggaaacgggaatatcttcctataaaatctagacagaagcattctcagaaactgctgtgtgatgtctgcattcaagtcacagagttgaacattgcctttcatagagcaggtttgaaacgctctttttgtagtatatggaagtggacgtttcggacggtttgaggcccatggtgataaagggaatatcttcccctacaagctagaaagaagcattgtgtgaaacttgtttgtgatgtgtgtactcaataacagagttgaacctttctttttacagagcagttttgaaacactctttttgtagaatctgcgaggggatatttggatagatttcaggatttcgttggaaacgggaatatcttcatataaaatctcgacagaagcattctcagaaacttctttgtgatacgtgcattctagtcacacgagttgaatattccctttcacagagtaggtttgaaacactctttttgtagtatctggaagtggacatttggagcgccttgacgcctacggtgaaaagggaaatatcttcccataaaaactagacagaagcaatctcagaattttctttgggatatatgcacacagccaacagagttgaacttttctattgacatagcagttttgaaacagtctttctgtggaatctgcaagtggatatttggatagcttggaggatttcgttggaaacgggattacgtataaaaagtagacagcagcatcctgagaaacttccttgtgatgtgtgcattcaagtcacagagttgaacattccctttcgtacagcagttttgaaacactctttctgtagtatctggaagtgaacattaggacagctttcaggtctatggtgagaaaggaaatatcttcaaataaaaagtagacagaagcattctcataaacttgtttgtgatgtgtgaactcagctaacagaggtggatctttcttttgatagagcagttctgaaaaacacgttttgttaaatctgcaagtggacatttggatagatttgaagatttcgttggaaacgggaatatcgtcatatcaaatctagacagaagcattctcagaaacgtctttgcgatgtttgcattcaactcatagagttgaacattccgtttcagagagcagctttgaggcactctttttgtagtatgtgcaagtggatatttggagcgctctgaggcctacagtgaaaaagcaaatatcttcccataaccactaacagaaacattctcagaaactcctttatgacgtatgcactcacctaacagagaagaaccttccttttgacagagcagttttggtacactctttttgtagaatctgcaagtggatatttggatagctgtgaagatttcgttggaaacgggaatatcttcctataaaatctagacagaagcattctcagaaaactgctctgtgatgtctgcattcaagtcacagagttgaacattgcctttcctagagcaggtttgaaacgctctttttgtagtatatggaagtggacgtttcggacggtttgaggcccatggtgataaagggaatatcttcccctacaagctagaaagaagcattctgtgaaacttgtttgtgaggtgtgtactcaactaacagagttgaacctttctttttacagagcagttttgaaacactctttttgtagaatctgcgaggggatatttggatagattacaggatttcgttggaaacgggaatatcttcatataaaatactcgacagaagcattctcagaaacttctttgtgatatctgcattcaagtcacagagttgaatattgcctttcacagagtaggtttgaaacactcttcttgtagtatctggaagtggacattttgagcaccttgacacctacggtgaaaagggaaatatcttcccataaaaactagacagaagcaatctcagaatcttctttgggatatatgcacgcagctaacagagttgaacctttctattgacagagcagttttgaaacagcctttctgtggaatctgcaagtggatatttggatagcttggaggatttcgttggaaacgggattacgtataataagtagacagcagcatcctcagtaaacttctttgtgatgtgtgcattcaagtcacagtgttgaacattccctttcgtacagcagttttgaaacactctttctgtagtatctggaagtgaacattaggacagctttcaggtctatggtgagaaaggaaatatcttcaaataaaaactagacagaagcattctcataaacttgtttgtgatgtgtgaactcagctaacagaggtggatctttcttttgatagagaagttctgaaaaacactttttgttgaatctgcaagtggacatttggatagatttgaagatttcgtaggaaacgggaatatcttcatatcaagtctagacagaagcattctcagaaacgtctttgtgatgtttgcattcaactcatagagttgaacattccgttacagagaacagctttgaagcactctttttgtagtatgtgcaagtggatatttggagcgctctgaggcctacggtgaaaaagcaaatatcttcccataaccactagacagaaacattctcagaaactcctttatgacgtatgcactcacgtaacacagaagaaccttccttttgacagagcagttttgatacactctttttgtagaatctgcaagtggatatttggatacctgtgaagatttcgttggaaacgggaatatcttcctataaaatctagacagaagcattctcaggaactgctctgcgacgtctgtattcaagtcacagagttgaacattgcctttcatagagcaggtttgaaacgctctttttgtagtatatggaagtggacgtttcggacggtttgaggcccatggtgataaagggaatatcttcccctacaagctagaaagaagcattctgtgaaacttgtttgtgatgtgtgcactcaactaacagagttgaacctttctttttacagagcagttttgaaacactctttttgtagaatctgcgaggggatatttggatacattcctggatttcgttggaaacgggaatatcttcatataaaatctcgacagaagcattctcagaaacttctttgtgatatgtgcattcaagtcacagagttgaatattccctttcacagagtaggtttgaaacactctttttgtagtatctggaagtggacatttggagggccttgacacctacggtgaaaagggaaatatcttcccataaaaactagacagaagcaatctcagaatctactttgggatatatgcacgcagctaacagagttgaacctttctattgacagagcagttttgaaacagtctttctgtggaatctgcaagtggatatttggatagcttggaggatttcgttggaaacgggattacgtataaaaagtagacagcagcatcctcagaaacttctttgtgatgtgtgcattcaagtcacagagttgaacattccctttcgtacagtagttttgaaacactctttctgtagtatctggaagtgaacattaggacagctttcaggtctatggtgagaaaggaaatatcttcaaataaaaactagacagaagcattctcataaacttgtttgtgatgtgtgaactcagctaacagaggtggatctttcttttgatagagcagttctgaaaaacactttttgttgaatctgcaagtggacatttggatagatttgaagatttcgttggaaacgggaatatcttcatattaaatctagacagaagcattctcagaaacgtctttgtgatgttagcattcaactcatagagttgaacattccctttcagagagcagctttgaagcactctttttgtagtatgtgcaagtggacatttggagcgctttgaggcctacagggaaaaagcaaatatcttcccataaccactagacaggaacattctcagaaactcctttatgacgtatgcactcacctaacagagaagaaccttccttttgactgagcagttttgatacactctttttgcagaatctgcaagtggatatttggatagctgtgaagatttcgttggaaacgggaatatcttcctataaaatctagacagaagcattctcagaaactgctctgtgatgtctgcattcaagtcacagagttgaacactgcctttcctagagcaggtttgaaacgctctttttgtagtatatggaagtggacgtttcggatggtttgaggcccatagtgataaagggaatatcttcccctacaagctagaaagaagcattctctgaaacttgtttgtgatgtgtgtactcaactaacagagttgaacctttctttttacagagcagttttgaaacactctttttgtagaatctgcgaggggatatttggatagatttcaggatttcgttggaaaggggaatatcttcatataaaatctcgacagaagcattctcagaaacttctttgtgatatctgccttcaagtcacagagttgaatattccctttcacagagtaggtttgaaacactctttctgtagtatctggaagtggacatttggagcgccttgacacctacggtgaaaagggaaatatcttcccataaaaacaagacagaagcaatctcagaatcttaccttgggatatatgcacgcaactaacagagttgaacctttctattgacagagcagttttgaaacagtctttctgtggaatctgcaagtggatatttggatagcttggaggatttccttggaaacgggattacgtataaaaagtagacagcagcatcctcagaaacttctttgtgatgtgtgcattcaagtcacagagttgaacatttccctttcgtacagcagttttgaaacactctttctgtagtatctggaagtgaacattaggacagctttcagctctatggtgagaaaggaaatatcttcaaataaaaactagacagaagcattctcataaacttgtttggatgtgtgaactcagctaacagaggtggatctttcttttgatagagcagttctgaaaaacactttttgttgaatctgcaagtggacatttggatagatttgaagatttcgttggaaacgggaatatcttcatatcaaatctagacagaagcattctcagaaacgtctttgcgatgtttgcattcaactcatagagttgaacattccgtttcagagagcagctttgaagcactctttttgtagtatgtgcaagtggatatttggagcgctctgaggcctacggtgaaaaagcaaatatcttcccataaccactaacagaaacattctcagaaactcctttatgacgtatgcactcacctaacagaaaagaaccttccttttgacagagcagttttgatacactctttttgtagaatctacaagtggatatttggatagctgtgaagatttcgttggaaacgggaatatcttcctataaaatctagacagaagcattctcagaaactgctctgtgatgtctgcattcaagtcacagagttgaacattgcctttcatagagcaggtttgaaacgctctttttgtagtatatggaagtggacttttcggacggttggaggcccatggtgataaagggaatatcttcccctacaagctagaaagaagcattgtgtgaaacttgtttgtgatgtgtgtactcaactaacagagttgaacctttctttttacagagcagttttgaaacactctttttgtagaatctgcgaggggatatttggatacatttcaggatttcgttggaaaccgggaatatcttcatataaaatctcgacagaagcattctcagaaacttctttgtgatatctgcattcaagtcacagagttgaatattcccttccacagagtaggtttgaaacactctttttgtggtatctggaagtggacatttggagcgccttgacgcctacggtgaaaagggaaatatcttcccataaaaactagacagaagcaatctcagaatcttctttgagatatatgcacgcagctaacagagttgaacctttctattgacagagcagttttgaaacagtctttctgtggaatctgcaagtggatatttggatagcttggaggatttcgttggaaacgggattacgtataaaaagtagacagcagcatcctcagaaacttctttgtgatgtgtgcattcaagtcacagagttgaacattccctttcgtacagcagttttgaaacgctctttctgtagtatctggaagtgaacattaggacagctttcaggtctatgttgagaaaggaaatatcttcaaataaaaactagacagaagcattctcataaacttgtttgtgatgtctgaactcagctaacagaggtggatctttcttttgatagagcagttctgaaaaacactttttgttgaatctgcaagtggacatttggatagatttgaagatttcgttggaaacgggaatatcttcatagcaaatctagacagaagcattctcaggaaacgtctttgtgatgtttgcattcaactcatagagttgaacattccctttcagagagcagctttgaagcactctttttgtagtatgtgcaaggggatatttggagcgctctgaggcctaaggtgaaaaagcaaatatcttcccataaccactagacagaaacattctcagaaactcctttatgacgtatgcactcacctaacagagaagaaccttccttttgacagagcatttttgatacactctttttgtagcatctgcaagtggatatttggatatctgtgaagatttcgttggaaacgggaatatcttcctataaaatctagacagaagcattctcagaaactgctttgtgatgtctgcattcaagtcacagagttgaacattgcctttcatagagcaggtttgaaacgctctttttgtagtatatggaagtggatgtttcgaacggtttgaggcccatggtgataaaggaaatatcttcccctagaagcgagaaagaagcattctgtgaaacttgtttgtgatgtgtgtactcaactaacagagttgaacctttcttttcacagggcagttttgaaacactctttttgtagaatctgcgatgggatatttggatagatttcaggatttcgtgggaaacgggaatatcttcatataaaatctcgacagaagcattctcagaaacttctttgtgatatgtgcattcaagtcacagagttcaatattccctttcacagagtaggtttgaaacactctttttgtagtatctggaagtggacatttggagcgccttgacgcctacggtgaaaagggaaatatcttctcataaaaagtagacagaagcaatctcagaatcttctttgggatatatgcacgcagctaacagagttgaacctttctatggacagagtagttttgaaacagtctttctgtggaatctgcaagtggatatttggatagcttggaggatttcgttggaaacgggattacgtataaaaagtagacagcagcatcctcagaaacttctttgtgatgtgtgcattcaagtcacagagttgaacattccctttcgtacagcagttttgaaacactcttcctgtagtatctggaagtgaacattaggacagctttcaggtctatggtgagaaaggaaatatcttcaaataaaaactagacagaagcattctcataaacttgtttgtgatgtgtgaactcagctaacagaggtggatctttcttttgatagagcagttctgaaaaacactttttgttgaatctgcaagtggacatttggatagatttgaagatttcgttggaaacgggaatatcttcatatcaaatctacacagaagcattctcagaaacgtctttgtgatgtttgcattcaactcatagagttgaacattccctttcagagagcagctttgaagcactctttttgtagtatgtgcaagtggatatttggagcgctctgaggcctacggggaaaagcaaatatcttcccataaccactagacagaaacattctcagaaacttctttatgacgtatgtactcaactagcagagaagaactttccttttgacagagcacttttgatacactctttttgtagtatctgcaagtggatatttggatagctgtgaagatttcgttggaatcgggaatatcttcctataaagtctggacagaagcattctcagaaactgctctgtgatgtctgcattcaagtcacagagttgaacattgcctttcatagagcaggtttgaaactctctttttgtagtatatggaagtggacgtttcggacggttggaggcccatggtgataaagggaatatcttcccctacaagctagaaagaagcattctgtgaaagttgtttgtgatgtgtgtactcaactaacagagttgaacctttctttttacagagcagttttgaaacactctttttgtagaatctgcgagaggatatttggatagatttcaggatttcgttggaaacgggaatatcttcatataaaatctcgacagaagcattctcagaaacttctttgtgatatgtgcattcaagtcacagaggtgaatattccctttcacagagtaggtttgaaacactctttttgtagtatctggaagtggacatttggagcgccttgacgcctacggtgaaaagggaaatatcttcccataaaaactagacagaagcaatctcagaatcctctttgggatatatgcacgcagctaacagagttgaacctttctattgacagagcagttttgaaacagtctttctgtggaatctgcaagtggatatttggatagcttggaggatttcgttggaaacgggattacgtataaaaagtagacagcagaattctcagaaagattttgtgatatctgcattgaagtcacagagttcaatattccctttcacatagaaagtttgaaacactctttttgtagtacctggaagtgaacatttcgagagctttcaggactatggtgagaaaggaaatatcttcaaataaaaacaagacagaagcattctcacaaacttgtttgtgttgtgtgaactcaacaaacaaaggtggatctttcttttgatacagcaattttgaaaaacactttttgtagaatctccaagtggatatttggatagatttgaagatttctttggaaacgggaatatcttcatataaaatctagacagaagcattctcagaaacgtctttgtgatgtttgcattcaactcatagagttgaacattccctttcagagagcagctgtgaagcactctttttgtagtatgtgcaagtggatatttggagcgctctgaggcctacggtgaaaaagcaaatatcttcccataaccactagacagaaccattctcagaaactcctttatgacgtatgcactcacctaacagagaagaaccttccttttgacagagcagttttgatacactctttttgtagaatctgcaagtggatatttggatagctgtgaagatttcgttggaaacgggaatatcttcctataaaatctagacagaagcattctcagaaactgctctctgatgtccgcattcaagtcacagagttgaacattgcctttcctagagcaggtttgaaacgctcttttggtagtatatggaagtggacgtttcggacggtttgaggcccatggtgataaagggaatatcttcccctacaagctagaaagaagcattgtgtgaaacttgtttgtgatgtgtgtactcaactaacagagttgaacctttctttttacagagcagttttgaaacactctttttgtagaatctgcaaggggatatttggatacatttcaggatttcgttggaaacgggaatatcttcatataaaatactcgacagaagcattctcagaaacttctttgtgatatgtgcattcaagtcacagagttgaatattccctttcatagagtaggtttgaaacactctttttgtagtatctggaagtggacatttggagcgccttgacgcctacggtgaaaagggaaatatcttcccataaaaactagacagaagcaatctcagcatcttctttgggatatatgcatgcagctaacagagttgaacctttctattgacagagcagttttgaaacagtctttctgtggaatctgcaagtggatatttggatagcttggaggatttcgttggaaacgggattacgtataaaaagtagacagcagcatcctcagaaacttctttgtgatgtgtgcattcaagtcacagagttgaatattccctttcacagagttggtttgaaacactctttttgtactatctggaagtggacatttggagcgccttgacacctacggtgaaaagggaaatatcttcccataaaaactagacagaagcattctcataaacttgtttgtgatgtgtgaactcagctaacacaggtggatctttcttttgattgagcagttctgaaaaacacgttttgttgaatctgcaagtggacatttggatagatttgaagatttcgttggaaacgggaatatcttcatatcaaatctagacagaagcattctcaggaaacgtctttgtgatgtttgcattcaactcatagagttgaacattcactttcagagagcagctttgaagcactctttttgtagtatgtgcaagtggatattttgatcgctctgtggcctacggtgaaaaagcaaatatcttcccataaccactagacagaaacattctcagaaactcccttatgacgtatgcactcacctaacagagaagaaccttccttttgacagagcagttttgatacactctttttgtagaatctgcaagtggatatttggatagctgtgaagatttcgttggaaacgggaatatcttcctataaaatctatacagaagcattctcagaaactgctctgtgatgtctgcattcaagtcacagagttgaacattgcctttcctagagcaggtttgaaacgctctttttgtagtatatggaagtggacgtttcggacggtttgaggcccttggtgataaagggaatatcttcccctacaagctagaaagaagcattctgtgaaacttgtttgtgatgtgtgtactcaactaacagagttgaacctttgtttttacagagcagttttgaaacactctttttgtagaatctgcgaggggatatttggatacatttcagcatttcgttggaaacgggaatatcttcatataaaatctcgacagaagcattctcagaaacttctttgtgatatgtgcattcaagtcacagagttgaatattccctttcacagagtaggtttgaaacactctttttctagtatctggaagtggacatttggagcaccttgacacctacggtgaaaagggaaatatcttctcataaaaagtagacagaagcaatctcagaatcttctttgggatatatgtacgcagctaacagagttgaacctttctattgacagagcagttttgaaacagtctttctgtggaatctgcaagtggatatttggatagcttggaggatttcgttggaaacgggattacgtataaaaagtagacagcagcatcctcagaaacttctttgtgatgtgtgcattcaagtcacagagttgaacattccctttcgtacagcagttttgaaacactctttctgtagtatctggaagtgaacattaggacagcattcaggtctatggtgagaaaggaaatatcttcaaataaaaactagacagaagcattctcataaacttgtttgtgatgtgtgaactcagctaacagaggtggatctttcttttgatagagcagttctgaaaaacactttttgttgaatctgcaagtggacatttggatagatttgaagatttcgttggaaacgggaatatcttcatatcaaatctagatagaagcattctcagaaacgtctttgtgatgtttgcattcaactcatagagttgaaaattccctttcagagagcagctttgaagcactctttttgtagtatgtgcaaggggatatttggagcgctctgaggcctaaggtgaaaaagcaaatatcttcccataaccactagacagaaacattctcagaaactcctttatgacgtatgtactcaactaacagagaagaaccttccttttgatagagcagttttgatacactctttttgtagaatctgcaagtggatatttggatagctgtgaagatttcgttggaaactggaatatcttcctataaaatctagacagaagcattctcagaaactgctctgtgatgtctgcattcaagtcactagagttgaacattgcctttcatagagcaggtttgaaacgctctttttgtagtatatggaagtggacgtttcggacggtttgaggcccatggtgataaagggaatatcttcccctacaagctagaaagaagcactctgtgaaacttgtttgtgatgtgtgtactcaactaacagagttgaacctttctttttacagagcagttttgaaacactctttttgtagaatctgcgaggggatatttggatagatttcaggatttcgttggaaacgggaatatcttcatataaaatctcgacagaagcattctcagaaacttctttgtgatatgtgcattcaagtcacagagttgaatattccctttcacagagtaggtttgaaacactctttttgtagtatctggaagtggacatttggagcgccttgacacctacggtgaaaagggaaatatcttcccataaatactagacagaagcaatctcagaatctcctttgggatatatgcacgcagctaacagagttgaacctttctattgacagaccagttttgaaacagtctttctgtggaatctgcaagtggatatttggatagattggaggatttcgttggaaacgggattacgtataaaaagtagacagcagcatcctcagaaacttctttgtgatgtgtgcattcaagtcacagagttgaacattctctttcgtacagcagttttgaaatgctctttctgtagtatctggaagtgaacattaggacagctttcatgtctatggtgagaaaggaaatatcttcaaataaaaactagacagaagcattctcataagcttgtttgtgatgtgtgaactcagctaacagaggtggatctttcttttgatagagcagttctgaaaaacactttttgttgaatctgcaagtggacatttggatagatttgaagatttctttggaaacgggaatatcttcatatcaaatctagacagaagcattctcagaaacgtctttgcgatgtttgcattcaactcatagagttaaacattccgtttcagagagcagctttgaggcactctttttgtagtatgtgcaagtggatatttggagcgctctgaggcctacggtgaaaaagcaaatatcttcccataaccactagacagaaacattctcagaaacttctttatgacgtatgtactcaactagcagagaagaactttccttttgacagagcatttttgatacactctttttgtactatctgcaagtggatatttggatagctgtgaagatttcgttggatacgggaatatcttcctataaagtctggacagaagcattctcagaaactgctctgtgacgtctgcattcaagtcacagagttgaacattgcctttcatagagcaggtttgaaacgctctttttgtagtatatggaagtagacgtttcggacggtttgaggcccatggtgataatgggaatatcttcccctacaagctagaaagaagcattctgtgaaacttgtttgtgatgtgtgtactcaactaacagagttgaacctttctttttacagagcagttttgaaacactctttttgtagaatctgcgaggggatatttggatagatttcaggatttcgttggaaacgggaatatcttcatataaaatactcgacagaagcattctcagaaacttctttgtgatatgtgcattcaagtcacagagttgaatattccctttcacagagtaggcttgaaacactctttttgtagtatctggaagtggacatttggagcgccttgacacctacggtgaaaagggaaatatcttcccataaaaactagacagaaagtaatctcagaaacttctttgggatatatgcacgcagctaacagagttgaacctttctattgacagagcagttttgaaacagtctttctgtggaatctgcaagtgaatatttggatagcttggaggatttcgttggaaacgggattacgtataaaaagtagacagcagcatcctcagaaacttctttgtgatgtgtgcattcaagtcacagagttgaacattccctttcgtacagtagttttgaaacactctttctgtagtatctggaattgaacattaggacagctttcaggtactatggtgagaaaggaaatatcttcaaataaaaactagacagaagcattctcataaacttgtttgtgatgtgtgaactcagctaacagaggtggatctttcttttgatagagcagttctgaaaaacactttttgttgaatctgcaagtggacatttggatagatttgaagatttcgttgcaaacgggaataccttcatatcaaatctagacagaagcattgtcagaaacgtctttgtgatgtttgcattcaactcatagagttgaacattccgtttcagagagcagctttgaggcactctttttgtagtatgtgcaagtggatatttggagcgctctgaggcctacggtgaaaaagcaaatatcttcccataaccactagacagaaacattctcagaaactcctttatgacgtatgcactcacctaacagaaaagaaccttccttttgacagagcagttttgatacacactttttgtagaatctgcaagtggatatttggatagctgtgaagattccgttggaaacgggaatatcttcctataaaatctagacagaagcattctcagaaactgctctgtgatgtctgctttcaagtcacagagttgaacattgcctttcatagagcaggtttgaaacgctctttttgtagtatatggaagtggatgtttcggacggttggaggcccatggtgataaagagaatatcttcccctacaagctagaaagaagcattctgtgaaacttgtttgtgatgtgtgtactcaactaacagagttgaacctttctttttacagaacagttttgaaacactctttttgtagaatctgcgaggggatatttggatacatttcagcatttcgttggaaacgggaatatcttcatataaaatctcgacagaagcattctcagaaacttctttgtgatatctgcattcaagtcacagagttgaatattccctttcacagagtaggtttgaaacactctttttgtagtatctggaagtggacatttggagcgccttgacacctacggtgaaaagggaaatatctttccataaaaactagacagaagcaatctcagaatcttctttgggatatatgcacgcagctaacagagttgaacctttctattgacagagtagttttgaaacagtctttctgtggaatctccaagtggatatttggatagcttggagtatttcgttggaaacgggattacgtataaaaagtagacagcagcatcctcagaaacttctttgtgatgtgtgcattcaagtcacagagttgaacattccctttcgtacagcagttttgaaacgctctttctgtagtatctggaagtgaacattaggacagctttcaggtctatgttgagaaagggaatatcttcaaataaaaactagacagaagcattctcataaacctttttgtgatgtgtgaactcagctaacagaggtggatctttcttttgatagagcagttctgaaaaacactttttgttgaatctgcaagtggacatttggatagatttgaagatttcgttggaaacgggaatatcttcatatcaaatctagacagaagcattctcagaaacgtctttgcgttgtttgcattcaactcatagagttgaacattccgtttcagaaagcagctttgaggcactctttttgtagtatgtgcaagtggatatttggagcgctctgaggcctacggtgaaaaagcaaatatctttccataaccactagacagaaacattctcagaaactcctttatgacgtatgcactcacctaacagagaagaaccttccttttgacagagcagttttgatgcactctttttgtagaatctgcaagtggatatctggatagctgtgaatatttcgttggaaacgggaatatcttcctataaaatctagacagaagcattctcagaaactgctctgtgatgtctgcattgaagtcacagagttgaacattgcctttcctagagcaggtttgaaacgctctttttgtagtatatggaagtggacgtttcggacggttggaggcccagggtgataaagggaatatcttcccctacaagctagaaagaagcattctgtgaaacttgtttgtgatgtgtgtactcaactaacagagttgaacctttcttttcacagagcagttttgaaacactctttttgtagaatctgcgaggggatatttggatagatttcaggatttctttggaaacgggaatatcttcatataaaatctcgacagaagcattctcagaaacttctttgtgatatgtgcattcaagtcacagagttgaatattccctttcacagagtaggtttgaaacactctttttgtagtatctggaagtggacatttggagcgccttgacgcctacggtgaaaagggaatatcttcccataaaaactagacagaagcaatcttagaatcttctttgggatatatgcacgcagctaacagagttgaacctttctattgacagagcagttttgaaacagtctttctgtggaatctgcaagtggatatttggatagattggaggatttcgttggaaacgggattacgtataaaaagtagactgcagcatcctcagaaacttctttgtgatgtgtgcattcaagtcacagtgttgaacattccctttcgtacagcagttttgaaacactctttctgtagtatctggaagtgaacattaggacagctttcagctctatggtgagaaaggaaatatcttcaaataaaaactagacagaagcattctcataaacttgtttgtgatgtgtgaactcagctaacagaggtggatctttcttttgatagagcagttctgaaaaacactttttgtttaatctgcaagtggacatttggatagatttgaagatttcgttggaaacgggaatatcttcatatcaaatctagacagaagcattctcggaaacgtctttgtgatgtttgcattcaacacatagagttgaacattccgtttcagagagcagctttgaagcactctttttgtagtatgtgcaagtggatatttggagcactctgaggcctagggtgaaaaagcaaatatcttcccataaccactagacagaaacattctcagaaactcctttataacgtatgcactcacctaacagagaagaaccttccttttgacagagcagttttgatacactctttttgtagaatctgcaagtggatatttggatagctgtgaagatttcgttggaaacgggaatatcttcctataaaatctagagagaagcattctcagaaactgctctgtgatgtctgcattcaagtcacagagttgaacattgcctttcatagagcaggtttgaaatgctctttttgtagtatatggaagtggacgtttcggacggtttgagacccatggtgataaagggaatatattcccctacaagctagaaagaagcattctgtgaaacttgtttgtgatgtgtgtactcaactaacagagttgaaactttctttttacagagcagttttgaaacactctttttgtagaatctgcgaggggatatttcgatagatttcaggattccgttggaaacgggaatatcttcatataaaatctcgacagaagcattctcagaaacttctttgtgatatgtgcattcaagttacagagttgaatattccctttcacagattaggtttgaaacactctttttgaggcatctggaagtggacatttggagcgccttgacgcctacggtgaaaagggaaatatcttcccataaaaactagacagaagcaatctcagaatcttctttgggatatatgcacgcagctaacagagttgaacctttctattgacagagcagttttgaaacagtctttctgtggaatccgcaagtggatatttggatagattagaggatttcgttggaaacgggattacgtataaaaagtagacagcagcatcctcagaaacttctttgtgatgtgtgcattcaagtcacagatttgaacattccctttcgtacagcagctttgaaacactctttctgtagtatctggaagtgaacattaggacagctttcaggtctatggtgagaaaggaaatatcttcaaataaaaactagacagaagcattctcataaacctgtttgtgatgtgtgaactcagctaacagaggtggatctttcttttgatagagcagttctgaaaaacactttttgttgaatctgcaagtggacatttggatagatttgaagatttcgttggaaacgggaatatcttcatatcaaatctagacagaagcattcgcggtaacgtctttgtgatgtttgcattcaactcatagagttgaacattccgtttcagagagcagctttgaagcactctttttgtagtatgtgcaagtggatatttggagcgctctgaggcctacggtgaaaaagcaaatatcttcccataaccactagacagaaacattctcagaaacttctttatgacgtatgtactcaactagcagagaagaactttccttttgacagagcatttttgatacactctttttgtagtatctgcaagtggatatttggatagctgtgaagatttcgttggaaacgggaatatcttcctataaagtctggacagaagcattttcagaaactgctctgtgatgtctgcattcaagtcacagagttgaacattgcctttcatagagcaggtttcaaacactctttttttagtatatggaagtggacgtttcggacggtttgaggaccatggtgataaaggaaatatcttcccctacaagctagaaagaagcattctgtgaaacttgtttgtgatgtgtgtactcaactaacagagtggaacctttctttttacagagcagttttgaaacactctttttgtagaatctgcgaggggatatttggatagatttcaggatttcgttggaaacgggaatatcttcatataaaatctcgacagaagcattctcagaaacttcattgtgatatctgcattcaagtcacagagtggaatattccctttcacagagtaggtttgaaacactctttttgtagtatctggaagtggacctttggagcgccttgacacctacggtgaaaagggaaatatcttcccgtaaaaactagacagaagcaatctcagaatcttctttgggatatatgcacgcagctaacagagttgaacctttctattgacagagcagttttgaaacagtctttctgtggaatctgcaagtggatgtttggatagattggaggatttcgttggaaacgggattacgtataaaaagtagacagcagcatcctcagaaacttatttgtgaggtgtgcattcaagtcacagagttgaacattccctttcgtacagcagttttgaaacactgtttctgtagtatctggaagtgaacattaggacagctttcaggtctatggtgagaaaggaaatatcttcaaataaaaactagacagaaacattctcataaatttgtttgtgatgtgtaaactcagctaacagtcgtggatctttcttttgatacagcagttttgaaaaacactttttgttgaatctgcaagtggacatttggatagatatgaagatttcgttggaaacgggaatatcttcatatcaaatctagacagaagcattctcagaaacgtctttgtgatgttttcattcaactcatagagttgaacattccgtttcagagaccagctttgaagcactctttttgtagtatgtgcaagtggatatttggagcgctctgaggcctacggtgaaaaagcaaatatcttcccataaccactagacagaaacattctcagaaactcctttatgacgtatgcactcacctaacagagaagaaccttccttttgacagagcagttttgatacactctttttgtagaatctgcaagtgaatatttggatacctgtgaagatttcgttggaaacgggaatatcttcctataaaatctagacagaaagcattctcagaaactgctctgtgatgtctgcattcaagtcacagagttgaacattgcctttcatagagcaggtttgaaacgctctttttgtagtatatggaagtggatgtttcggacggttggaggcccatggtgataaagggaatatcttcctctacaagctagaaagagaagcattctgtgaaacttgtttgtgatgtgtgtactcaactaacagagttgaacctttctttttacagagcagttttgaaacactctttttgtagaatctgcgaggggatatttggatagatttcaggatttctttggaaaggggaatatcttcatataaaatctcgacagaagcattctcagaaacttctttgtgatatctgcattcaagtcacagagttgaatattccctttcacagagtaggtttcaaacattctttttgtagtatctggaagtggacatttggagcgccttgacgcctacggtgaaaagggaaatatcttcccataaaaactagacagaagcaatctcagaatcttctttgggatatatgcacgcagctaagagagttgaatctttctattgacagagcagatttgaaacagtctttctgtggaatctgcaagtggatatttggatagattggaggatttcgttggaaacgggtttacgtataaaaagtagacagccagcatcctcagaaacttctttgtgatgtgtgcattcaagtcacagagttgaacattccctttcgtacagcagttttgaaacactctttctgtagtatctggaagtgaacattaggacagctttcaggtctatggtgagaaaggaaatatcttcaaataaaaactagacagagcattctgataaacttgtttgtgaagtgcgaactcagctaacagaggtggatctttcttttgaaacagcagttttaaaaaacactttttgttgaatctgcaagtggacatttgaatagatttgaagatttcgttggaaacaggaataccttcatatgaaatctagacagaagcattctcagaaacgtctttgtgatgattgcattcaactcatagagttgaacattccgtttcagagagcagctttgaagcactctttttgtagtatgtgcaagtggatatttggagtgctctggggcctacggtgaaaaagcaaatatcttcccataaccactagacagaaaacattctcagaaactcctttatgacgtatgcactcacctaacagagaagaaccttccttttgacagagcagttttgatacactctttttgtagaatctgcaagtggatatttcgatagctgtgaagattttgttggaaacgggaatatcttcctataaaatctagacagaagcattctctgaaactgctctgtgatgtctgcattcaagtcacagagttgaacgttgcctttcatagagcaggtttcaaacactctttttttagtatatggatgtggacgtttcggacggtttgaggaccatggtgataaaggaaatatcttcccctacaagctagaaagaagcattctgtgaaacttgtttgtgatgtgtgtactcaactaacagagttgaacctttctttttacagagcagttttgaaacactctttttgtagaatctgcgaggggatatttggatagatttcaggatttcgttggaaacgggaatatcttcatataaaatcttgacagaagcattctcagaaacttccttgtgatatgtgcattcaagtcacagagttgaatattccctttcacagagtaggtttgaaacactctttttgtagtatctggaagtggtcatttggagcgccttgacgcccacggtgaaaagggaaatatcttcccataaaaactagacagaagcaatctcagaatcttctttgggatatatgcacgcagctaacagagttgaacctttctattgacagagcagttttgaaacagtctttctgtggaatctgcaagtggatatttggatagcttggaggatttcgttggaaacgggattacgtataaaaaatagacagcagcatcctgagaaacttccttgtgatgtgtgcattcaagtcacagagttgaacattccctttcgtacagcagttttgaaacactctttctgtagtatctggaagtgaacattaggacagcgttcaggtctatggtgagaaaggaaatatcttcaaataaaaagtagacagaagcattctcatcaatttgtttgtgatgtgtgaactcagctaacagaggtggatctttcttttgatagagcagttctgaaaaacactttttgttgaatctgcaagtggacatttggatagatttgaagatttcgttggaaacgggaatatcttcatatcaagtctagacagaagcattctcagaaacgtctttgtgatgtttgcattcaactcatagagttgaacattccctttcagagagcagctttgaagcactctttttgtagtatgttcaagtggacatttggagcgctttgaggcttacggggaaaaagcaaatatcttcccataaccactagacagaaaacattctcagaaactcctttatgacgtatgcactcacctaacagcaaaagaaccttccttttgacagagcagttttgatacactctttttgtagaatctgcaagtggatatttggatagctgtgaagatttcgttggaaacgggaatatcttcctataaagtctagacagaagcattctcagaaactgctctgtgatgtttgcattcaagtcacagagttgaacattgcctttcctagagcaggtttgaaacgctctttttgtactatatggaagtggacgtttcggacggtttgaggcccatggtgataaagggaatatcttcccctacaagctagaaagaagcattctgtgaaacttgtttgtgatgtgtgtactcaactaacagagttgaacctttctttttacagagcagctttgaaacactctttttgtagaatctgcgaggggatatttggatagatttcaggatttcgttggaaacgggaatatcttcatataaaatctcgacagaagcattctcagaaccttctttgtgatatgtgcattcaagtcacagagttgaatattccctttcacagagtaggtttgaaacactctttttgtagtatctggaagtggacattttgagcaccttgacgcctacggtgaaaagggaaatatcttctcataaaaagtagacagaagcaatctcagaatcttctttgggatatatgcacgcagctaacagagttgaacctttctattgacagagcagttttgaaacagtctttctgtggaatctgcaagtggatatttggatagcttggaggatttcgttggaaacgggattaagtataaacagtagacagcagcatcctcagaaacttctttgtgatgtgtgcattcaagtcacagagttgaacattccctttcgtacagcagttttgaaacactctttctgtagtaactggaagtgaacattaggacagctttcaggtactatggtgagaaaggaaatatcttcaaataaaaactagacagaagcattctcataaacttgtttctgatgtgtgaactcagctaagagaggtggatctttcttttgatagagaagttctgaaaaacactttttgttgaatctgcaagtggacatttggatagatttgaagatttcgttggaaacgggaatatcttcatatcaaatctagacagaagcattctcagaaacctctttgtgatgtttgcattcaactcatagagttgaacattcccttccagagagcagctttgaggcactctttttgtagcatgtgcaagtggacatttggagcgccctgaggcctacggggaaaaagcaaatatcttcccataaccactagacagaaacattctcagaaactcctttatgacgtatgcactcacctaacagagaagaaccttccttttgacagagcagttttgatacactctttttgtagaatatgcaagtggatatttggatagctgtgaagatttcgttggaaacgggaatatcttcctataaaatctagacagaagcattctcagaaactgctctgtgatgtttgctttcatgtcacagagttgaacattgcctttcatagagcaggtttcaagcactctttttttagtatatggaagtggacgtttcggacggtttgaggcccatggtgataaaggaaatatcttcccctacaagctagaaagaagcattgtgtgaaacttatttgtgatgtgtgtactcaactaacagagttgaacctttctttttacagagcagttttgaaacactctttttgtacaatctgcgaggggatatttggatacatttcaggattttgttggaaacgggaatatcttcatataaaatctcgacagaagcattctcagaaacttctttgtgatatctgcattcaagtcacagagttgaatattccctttcacagagtaggtttgaaacactctttttgtagtatctggaagtggacatttggagcgccttgacacctattgtgaaaagggaaatatcttcccataaaaactagacagaagcaatctcagaattttctttgggatatatgcacacagctaacagagttgaacttttctattgacagagcagttttgaaacagtctttctgtggaatctgcaagtggatatttggatagcttggaggatttcgttggaaacgggattacgtataaaaagtagacagcagcatcctcagaaacttctttgtgatgtgtgcattcaagtcacagagttgaacattcccttttgtacagcagttttgaaacactctttctgtagtatctggaagtgaacattaggacagctttcaggtctatggtgagaaagaaaatatcttcaaataaaaactagacaagaagcattctcataaacttgtttgtgatgtgtgaactcatctaacagaggtggatctttcttttgatagagcagttctgaaaaacactttttgttgaatctgcaagtggacatttggatagatttgaagatttcgttggaaacgggaatatcttcatataaaatctagacagaagcattctcagaaacgtctttgtgatgtttgcattcaactcatagagttgaacattccctttcagagagcagctttgaaacactctttttgtagtatgtgcaagtggatatttggagcgctctgaggcctaaggtgaaaaggcaaatatcttcccataaccactagacttaaacattctcagcaaactcctttatgacgtatgcactcacctaacagaaaagaaccttccttttgacagagcagttttgatacactctttttgtagaatctgcaagtggatatttggatagctgtgaagatttcgttggaaacgggaatatcttcctataaaatctagacagaagcattctcagaaactgctctgtgatgtctgcattcaagtcacagagttgaacattgcctttcatagagcaggtttgaaactctctttttgtagtatatggaagtggacgtttcggacggtttgaggcccatggtgataaagggaatatcttcccctacaagctagaaagaagcattgtgtgaaacttgtttgtgatgtgtgtactcaactaacagagttgaacctttctttttacagagcagttttaaaacactctttttgtagaatctgcgaggggatatttggatacatttcaggatttcgttggaaacgggaatatcttcatataaaatctcgacagaagcattctcagaaacttctttgtgatatgtgcattcaagtcacagagttgaatattccctttcacagagtaggtttgaaacactctttttgtagtatttggatgtggacatttggagcgccttgacacctacggtgaaaagggaaatatcttcccataaaaactagacagaagcaatctcagaatcttctttgggatatatgcacgcagcaaacagagttgaacctttctattgactgagcagatttgaaacagtctttctgtggaatctgcaagtggatatttggatagcttggaggatttcgttggaaacgggattacgtataaaaagtagacagcagcatcctcagaaacttctttgtgatgtgtgcattcaagtcacagagttgaacattccctttcgtacagcagttttgaaacactctttctgtagtatctggaagtgaacattaggacagctttcaggtctatggtgagaaaggaaatatcttcaactaaaaactagacagaagcattctcataaacttgtttgtgatgtgtgaactcagctaacagaggtggatctttcttttgatagagcagttctgaaaaacactttttgttgaatctgcaagtggacatttcgatagatttgaagatttcgttggaaacgggaatatcttcatatcaaatctagacagaagcattctcagaaacgtctttgtgatgtttgcattcaactcatagagttgaacattccttttcagagagcagctttgaagcactctttttgtactatgtgcaagtggatatttggagcgctctgaggcctacggtgaaaaagcaaatatcttcccataaccactagacagaaacattctcagaaactcctttatgacgtatgtactcacctaagagagaagaaccttccttttgacagagcagttttgatacactctttttgtagaatctgcaagtggatatttggatagctgtgaagatttcgttggaaacgggaatatcttcctataaaatctagacagaagcattctcagaaactgctctgtgatgtctgcattcaagtcacagagttgaacattgcctttcatagagcaggtttgaaacgctctttttgtagtatatggaagtggacttttcggacggtttgaggcccatggtaataaagggaatatcttcccctacaagctagaaagaagcattctgtgaaacttgtttgtgatgtgtgtactcaagtaacagagttgaacctttctttttacagagcagttttgaaacactctttctgtagaatctgcgaggggatatttggatagatttcaggatttcgttggaaacgggaatatcttcatataaaacctcgacagaagcattctcagaaacttctttgtgatatgtgcattcaagtcacagagttgaatattcgctttcacagagtaggtttgaaacactctttttgtagtatctggaagtggacatttggagcgccttgacgcctacggtgaaaagggaaatatcttcccataaaaactagacagaagcaatctcagaatcttctttgggatatatgcacgcagctaacagagttgaacctttctattgacagagcagttttgaaactgtctttctgtggaatctgcaagtggatatttggatagattggaggatttcgttgcaaaggggattacgtataaaaagtagacagcagcatcctcagaaatcattctttgtgatgtgtgcattcaagtcacagagttgaacattccctttcgtacagcagttttgaaacactctttctgtagtatctggaagtgaacattaggacagctttcaggtctatggtgagaaaggaaatatcttcaaataaaaactagatagaaagcattctcataaacttgtttgtgatgtgtgaactcagctaacagaggcggatctttcttttgatagagcagttcggaaaaacactttttgttgaatctgcaagtggacatttggatagatttgaagatttcgttggaaacgggaatatcttcatatcaaatctagacagaagcattctcagaaacgtctttgcgatgtttgcattcaactcatcgagttgaacattccgtttcagagagcagctttgaggcactctttttgtagtatgtgcaagtggatatttggagcgctctgaggcctacggtgaaaaagcaaatatcttcccataaccactagacagaaacattctcagaaactcctttatgacgtatgcactcacctaacagaaaagaaccttccttttgacagagcagtttagatacactctttttgtagaatctgcaagtggatatttggatagctgtgaagatttcgttggaaacgggaatatcttcctataaaatctagacagaagcattctcagaaactgctctgtgatgtctgcattcaagtcacagagttgaacattgcctttcatagagcaggtttgaaacactctttttgtagtatatggaagtggacatttcggacggtttgaggcccatggtgataaagggaatatcttcccctacaagctagaaagaagcattctgtgaaactagtttgtgatgtgtgtactcaactaacagagttgaacctttctttttacagagcagtattgaaacactctttttgaagaatctgcgaggggatatttggatagatttcaggatttcgttggaaacgggaatatcttcatataaaatctcgacagaagcattctcagaaacttctttgtgatatctgcattcaagtcacagagttgaatattccctttcacagagtaggtttgaaacactctttttgtagtatctggaagtggacatttggagcaccttgacacctacggtgaaaagggaaatatcttcccataaatactagacagaagcaatctcagaatcttctttgggatatatgcacgcagctaacagagttgaacctttctattgacagagcagttttgaaacagtctttctgtggaatctgcaagtggacatttggatagcttggaggatttcgttggaaacgggattacgtataaaaagtagacagcagcatcctcagaaacttctttgtgatgtgtgcattcaagtcacagagttgaacattccctttcgtacagcagttttgaaacactctttctgtagtatctggaagtgaacactaggacagctttcaggtctatggtgagaaaggaaatatcttcaaataaaaactagacagaagcattctcataaacttgtttgtgatgtgtgaactcagctaacataggtggatctttcttttgatagagcagttctgaaaaacactttttgttgaatctgcaagtggacatttggatagatttgaagatttcgttggaaacgggaatatcttcatatcaaatctagacagaagcattctcagaaacgtctttgcgatgtttgcattcaactcatagagttgaacattccctttcagagagcagctttgaggcactctttttgtagtatgtgcaagtggatatttggagcgctctgaggcctacggtgaaaaagcaaatatcttcccataaccactagacagaaacattctcagaaacttctttatgacgtatgtactcaactagcagagaagaactttccttttgacagagcatttttgatacattctttttgtagtatctgcaagtggatatttggatagctgtgaagatttccttggaaacgggaatatcttcctataaagtctggacagaagcattctcagaaactgctctgtgatgtctgcattcaagtcacagagttgaacattgcctttcatagagcaggtttcaaacactctttttttagtatatggaagtggacgtttcggatggtttgaggcccatggtgataaaggaaatatcttcccctacaagctagaaagaagcattctgtgaaacttgtttgtgatgtgtgtactcaactaatagagttgaacctttctttttacagagcagttttgaaacactctttttgtagaatctgcgaggggatatttggatagatttcaggatttcgttggaaacgggaatatcttcatagaaaatctcgacagaagcattctcagaaacttccttgtgatatgtgcattcaagtcacagagttgaatattccctttcacagagtaggtttgaaacactctttttgtagtatccggaagtggacatttggagcgccttgacgcccacggtgaaaagggaaatatcttcccataaaaactagacagaagcaatctcagaatcttctttgggatatatgcacgcaactaacagagttgaacctttctattgacagagcagttttgaaacagtctttctgtggaatctgcaagtggatatttggatagcttggaggatttcgttggaaacgggattaggtataaaaagtagacagcagcatcctcagaaacttctttgtgatgtgtgcattcaagtcacagagttgaacattccctttcgtacagcagttttgaaacactctttctgtagtatctggaagtgaacattaggacagctttcaggtctatggtgagaaaggcaatatcttcaaataaaaactagacagaagcattctcataaacttgtttgtgatgtgtgaactcagctaacagacgtggatctttcttttgatacagcagtttcgaaaaacactttttgttgaatctgcaagtggacatttggatagatttgaagatttcgttggaaacgggaatatcttcatatcaaatctagacagaagcattctcagaaacgtctttgtgatgtttgcattcaactcatagagttgaacattccgtttcagagagcagctttgaagcactctttttgtagtatgtgcaagtggatatttggagcgctctgaggcctacggtgaaaaagaaaatatcttcccataaccactagacagaaacattctcagaaactcctttatgacgtatgtactcaactaacagagaagaaccttccttttgaaagagcagttttgatacactctttttgtagaatctgcaagtggatatttggatagctgtgaagatttctttggaaacgggaatatcttcctataaaatctagacagaaagcattctcagaaactgctctgtgatgtctgcattcaagtcacagagttgaacattgcctttcatagagcaggtttgaaacgctctttttgtagtatatggaagtggatgtttcggacggttggaggcccatggtgataaagggaatatcttcccctacaagctagaaagaagcattgtgtgaaacttgtttgtgatgtgtgtactcaactaacagagttgaacctttctttttacagagcagttttgaaacaatctttttgtagaatctgcgaggggatatttggatagatttcaggatttcgttggaaacgggaatatcttcatataaaatctcgacagaaagcattctcagaaacttctttgtgatatgtgcattcaagtcacagaggtgaatattccctttcacagagtaggtttgaaacactctttttgtagtatctggaagtggacatttggagcgccttgacgcctacggtgaaaagggaaatatcttcccataaaaactagacagaagcaatctcagaatcttctttgggatatatgcacgcagctaacagagttgaacctttctattgacagagcagttttgaaacagtctttctgtggaatctgcaagtggatatttggatagcttggaggatttcgttggaaacgggattacgtataaaaagtagacagcagcatcctcagaacctccttttgatgtgtgcattcaagtcacagagttgaacattccctttcgtacagcagtattgaaacactctttctgtagtatctggaagtgaacattaggacagctttcaggtctatggtgagaaaggaaatatcttcaaataaaaactagacagaagcattctcataaacttgtttgtgatgtgtgaactcagctaacagaggtggatctttcttttgatagagcagttcggaaaaacactttttgttgaatctccaagtggacatttggatagatttgaagatttcgttggaaacgggaatatctttatatcaaatctagacagaaggcattctcagaaacgtctttgtgatgtttgcattcaactcatagagttgaacattccctttcagagagcagctttgaagcactctttttgtagtatgtgcaaggggatatttggagcgctctgaggcctaaggtgaaaaagcaaatatcttcccataaccactagacagaaacattctcagaaactcctttatgacgtatgcactcacctaacagagaagaaccttccttttgacagagcagttttgatacactctttttgtagaatctgcaagtggatatttggattgctgtgaagatttcgttggaaacgggaatatcttcctataaaatctagacagaagcattctcagaaactgctctgtgatgtctgcattcaagtcacagagttgaacattgccgttcatagagcaggtttgaaacactctttttgtaatatatggaagtggacgtttcggacggtttgaggcccatggtgataaagggaatatcttcccatacaagctagaaagaagcattgtgtgaaacttgtttgtgatgtgtgtactcaactaacagagttgaacctttctttttacagagtagttttgaaacactctttttgtagaatctgcgaggggatatttggatacatttcaggatttcgttggaaacgggaatatcttcatataaaatctcgacagaagcattctcagaaacttctttgtgatatgtgcattcaagtcacagagttgaatattccctttcacagagtaggtttgaaacactctttttgtagtatctggaagtggacatttggagcgcctcgacgcctaccctgaaaagggaaatatcttcccataaaaactagacagaagcaatctcagaatcttctttgggatatatgcacgcagctaacagagttgaacctttctattgacagagcagttttgaaacagtctttctgtggaatctgcaagtggatatttggatagcttggaggatttcgttggtaacgggattacgtataaaaattagacagcagcatcctcagaaacttccttgtgatgtgtgcattcaagacacagagttgaacattccctttcgtacagcagttttgaaacactctttctgtagtatctggaagtgaacattaggagagctttcaggtctataattagaaaggaaatatcttcaaataaaaactagacagaagcattctcataaacttgtttgtgatgtgtgaactcagctaacagaggtggatatttcttttgatagagcagttctgaaaaacactttttgttgaatctgcaagtggacatttggatagatttgaagatttcgttggaaacgggaatatcttcatatcaaatctagacagaagcattctcagaaacgtctttgcgatgtttgcattcaactcatagagttgaacattccgtttcagagagcagctttgaggcactctttttgtagtatgtgcaagtggatatttggagcgctctgaggcctacggtgaaaaagcaaatatcttcccataaccactagtcagaaacattctcagaaactcctttatgacgtatgcactcacctaacagagaagaaccttccttttgacagagcagttttgatacacactttttgtagaatctgcaagtggatatttggatagctgtgaagatttcgttggaaacgggaatatcttcctataaaatctagaaagaagcattctcagaaactgctctgtgatgtctgcattcaagtcacagagttgaacattgcctttcatagagcaggtttgaaacgctctttttgtagtatatggaagtggacgtttcggacggttggaggcccatggtgataaagggaatatcttcccctacaagctagaaagaagcattctgtgaaacttgtttgtgatgtgtgtactcaactaacagagttgaacctttctttttacagagcagttttgaaacactctttttgtagaatctgcgaggggatatttggatagatttcaggatttggttggaaactggaatatcttcatataaaatctcgacagaagcattctcagaaacttctttgtgatatgtgcattcaactcacagagttgaatattccctttcacagagtaggtttgaaacactctttttgtagtatctggaagtggacatttggagcgccttgacgcctacggtgaaaagggaaatatcttcccataaaaactagacagaagcaatctcagaatcttctttgggatatatgcacgcagctaacagagttgaacctttctattgacagagcagttcttaaacagtctttctgtggaatctgcaagtggatatttggatagcttggaggatttcgttggaaacgggattacgtataaaaagtagacagcagcatcctcagaaacttctttgtgatgtgtgcattcaagtcacagagttgaacattccctttcatacagcagtttctgaaacactctttctgtagtatctggaagtgaactttaggacagctttcaggtctatagtgagaaaggatatatcttcaaataaaaactagacagaagcattctcataaacttgtttgtgatgtgtgaactcagctaacagacgtggatctttcttttgatacagcagttttgtaaaacactttttgttgaatctgcaagtagacatttggatagatttgaagatttcgttggaaacgggaatatcttcatatcaaatctagacagaagcattctcagaaacgtctttgcgatgtttgcattcaactcatagagttgaacattccgtttcagagagcagctgtgaggcactctttttgtagtatgtgcaagtggatatttggagcgctctgaggcctacggtgaaaaagcaaatatcttcccataaccactagacagaaacattctcagatactcctttatgacgtatgcactcacctaacagagaagaaccttccttttgacagagcagttttgatacactctttttgtagaatctgcaagtggatatttggatagctgtgaagatttcgttggaaacgggaatatcttcctataaaatctagacagaagcattctcagaaactgctctgtgatgtctgcattcaagtcacagagttgaacattgactttcgtagagcaggtttgaaacgctctttttgtagtatataaaagtggacgtttcggacggtttgaggcccatggtgataaagggaatatcttcccctacaagctagaaagaagcattctgtgaaacttgtttgtgatgtgtgtactcaactaacagagttgaatctttctttttacagagcagttttgaaacactctttttgtagaatctgcgaggggatatttggatagatttcaggatttcgttggaaacgggaatatcttcatataaaatctcgacagaagcattctcagaaacttctttgtgatatctgcattcaagtcacagagttgaatactccctttcacagagtaggtttgaaacactctttttgtagtatctggaagtggacatttggagcgccttgacgcctacggtgaaaagggaaatatcttcccataaaaactagacagaagtaatctcagaaacttctttgggatatatgcacgcagctaacagagttgaacctttctattgacagagcagttttgaaacagtctttctgtggaatctgcaagtgaatatttggatagtttggaggatttcgttggaaacgggattacgtataaaaagtagacagcagcatcctcagaaacatccttgtgatgtgtgcattcaagtcacagagttgaacattccctttcgtacagcagttttgaaacactctttctgtagtaactggaagtgaacattaggacagctttcaggtctatggtgagaaaggaaatatcttcaaataaaaactagacggaagcattctcataaacttgtttgtgatgtgtgaactcagctaacagaggtggaactttcttttgatagagcagttctgaaaaacactttttgttgaatctgcaagtggacatttggatagatttgaagatttcgttggaaacgggaatatcttcatatcaaatctagacagaagcattctcagaaacgtcttttgtgatgtttgcattcaactcatagagttgaacattccgtttcagagagcagctttgaggcactctttttgtagtatgtgcaagtggatatttggagcgctctgaggccttcggtgaaaaagcaaatatcttcccataaccactagacagaaacattctcagaaactactttatgacgtatgtactcaactaacagagaagaaccttccttttgacagagcagttttgatacactctttttgtagaatctgcaagtgtatatttggataactgtgaagatttcgttggaaacgggagtatcttcctataaaatctagacagaagcattctcagtaaactgctctgtgatgtctgcattcaagtcacagagttgaacattgcctttcctagagcaggtttgaaacgctctttttgtagtatatggaagtggacgtttcggacggttggaggcccatggtgataaagggaatatcttcccctacaagctagaaagaagcattctgtgaaacttgtttgtgatgtgtgtactcaactaacagggttgaacctttctttttacagagcagttttgaaacaatctttttgtagaatctgcgaggggatatttggatagatttcaggatttcgttggaaacgggaatatcttcatataaaatctcgacagaagcattctcagaaacttctttgtgatatctgcctttaagtcacagagttgaatattccctttcacagagtaggtttgaaacactctttttgtagtatctggaagtggacatttggagccccttgacacctacggtgaaaagggaaatatcttcccataaaaactagacagaagcaatctcagaatcttctttgggatatatgcacgcagttaacagagttgaacctttctattgacagagcagttttgaaacagtctttctgtggaatctgcaagtggatatttggatagattggaggatttcgttggaaacgggattacgtataaaaagtagacagcagcatcctcagaaacttctttgtgatgtgtgcattcaagtcacagagttgaacattccctttcgtacagcagttttgaaacactctttctgtagtatctggaagtgaacattatgacagctttcagctctatggtgagaaaggaaatatcttcaaataaaaactagacagaagcattctcataaacttgtttgtgatgtgtgaactcagctaacagaggtggatctttcttttcatagagcagttctgaaaaacactttttgttgaatctgcaagtggacatttggatagatttgaagatttcgttggaaacgggaatatcttcatatcaaatctagacagaagcattctcagaaacgtctttgtgatgtttgcattcaactcatagagttgaacattccgtttcagagagcagctttgaagcactctttttgtagtatgtgcaagtggatatttggagcgctctgaggcctacggtgaaaaagcaaatatcttcccataaccactatacagaaacattctcagaaactcctttatgacgtatgcactcacctaacagagaagaaccttccttttgacagagcagttttgatacactctttttgtagaatctgcaagtggatatttggatagctgtgaagatttctttggaaacgggaatatcttcctataaaatctagacagaagcattctcaggaactgctctgccgatgtctgtattcaagtcacagagttgaacattgcctttcatagagcaggtttgaaacgctctttttgtagtatatggaagtggacgtttcggacggtttgaggcccatggtgataaagggaatatcttcccctacaagctagaaagaagcattctgtgaaacttgtttgtgatgtgtgtactcaactaacagagttgaacctttctttttacagagcagttttgaaacactctttttgtagaatctgcgaggggatattttgatacatttcagcatttcattggaaacgggaatatcttcatataaaatctcgacagaagcattctcagaaacttatttgtgatatgtgcattcaagtcacagagttgaatattccctttcacagagtaggtttgaaacactctttttgtagtatctggaagtggacatttggaacgccttgacacctatggtgaaaagggaaatatcttcccataaaaactagacagaagcaatctcagaatctcctttgggatatatgcacgcagctaacagagttgaacctttctattgacagagcagttttgaaacagtctttctgtggaatctgcaagtggatatttggatagcttggaggatttcgttggaaacgggattacgtataaaaagtagacagcagcatcctcagaaacttctttgtgatgtgtgcattcaagtcacagtagttgaacattccctttcgtacagcagttttgaaacactctttctgtagtaactggaagtgaacattaggacagctttcaggtctatggtgagaaaggaaatatcttcaaataaaaactagacaaaagcattctcataaacttgtttgtgatgtgtgaactcagctaacagaggtggatctttcttttgatagagcagttctgaaaaacactttttgttgaatctgcaagtggacatttggatagatttgaagatttcgttggaaacgggaatatctttatatcaaatctagacagaagcattctcagaaacgtctttgtgatgtttgcattcaactaatagagttgaacattccgtttcagagagcagctttgaggcactctttttgtagtatgtgcaagtggatatttggagcgctctgaggcctacggtgaaaaagcaaatatcttcccataaccactagacagaaacattctcagaaactcctttatgacgtatgcactcacctaacagagaagaaccttccttttgacacagcagttttgatacactctttttgtagaatctgcaagtggatatttggatagctgtgaagatttcgttggaaacgggaatatcttcctataaaatctagacagaagcattctcagaaactgctctgtgatgtctgcattcaagtcacacagttgaacattgcctttcatagagcaggtttgaaacgctctttttgtagtatatggaagtggatgtttcggacggttggaggcccatggtgataaagggaatatcttcccctacaagctagaaagaagcattctgtgaaacttgtttgtgatgtgtgtactcaattaacagagttgaacctttctttttacagagcagttttgaaacactctttttgtagaatctgtgaggggatatttggatagatttcaggattttgttggaaacgggaatatcttcatataaaatctcgacagaagcaatctcagaatcttctttgggatgtatgcacgcagctaacagagttgaacctttctattgacagagcagttttgaaagagtctttctgtggaatctgcaagtggatatttggatagcttggaggatttcgttggaaacgggattacgtataataagtagacagcagcatcctcagaaacttctttgtgatgtgtgcattcaagtcacagagttgaacattccctttcgtacagcagttttgaaacactctttctgtagtatctggaagtgaacattaggacagctttcaggtttatggtgagaaaggaaatatcttcaaataaaaactagacagaagcattctcataaacttgtttgtgatgtgtgaactcagctaacagacgtggatctttcttttgatagagcagttctgaaaaacactttttgttgaatctgcaagtggacatttggatagatttgaagatttcgttggaaacgggaatatcttcatatcaaatctagacagaagcattctcagaaacgtctttgtgatgtttgcattcaactcatagagttgaacattccctttcagagagcagctttgaagcactctttttgtagtctgtgcaagtggatatttggagcgctctgaggcctacggtgaaaaagcaaatatcttcccataaccactagacagaaacattctcagaaactcctttatgacgtatgcacttacctaacagagaagaaccttccttttgacagagcagttttgatacactctttttgtagaatctgcaagtggatatttggatagctgtgaagatttcgttggaaacgggaatatcttcctataaaatctagacagaagcattctcagaaactgctctgtgatgtctgcattcaagtcacagagttgaacattgcctttcatagagcaggtttcaaacactgtttttttagtatgtggaagtggacgtttcggacggtttgagaaccatggtgataaaggaaatatcttcccctacaagctagaaagaagcattctgtgaaacttgtttgtgatgtgtgtagtcaactaacagagttgaacctttctttttacagagcagttttgaaacactctttttgtagaatctgcgaggggatatttggatagatttcaggatttcgttggaaacgggaatatcttcatataaaatctcgacagaagcattctcagaaacttctttgtgatatgtgcattcaagtcacagagttgaatattccctttcacagagtaggtttgaaacactctttttgtagtatctggaagtggacatttggcgcgccttgacacctacggtgaaaagggaaatatcttcccataaaaactagacagaagcaatctcagaatcttctttgggatatatgcacgcagttatcagagttgaacctttctattgacagagcagttttgaaacagtctttctgtggaatctgcaagtggatatttggatagcttggaggatttcgttggaaacgggattacgtataaaaagtagacagcagcatcctcagaaacttctttgtgatgtgtgcattcaagtcacagcagttgaacattccctttcatacagcagttttgaaacactctttctgtagtaactggaagtgaacattaggacagctttcaggtctatggtgagaaaggaaatatcttcaaataaaaactagacagaagcattctcataaacttgtttgtgatgtgtgaactcggctaacacaggtggatctttcttttgattgagcagttctgaaaaacactttttgttgaatctgcaagtggacatttggatagatttgaagatttcgttggaaacgggaatatcttcatatcaaatctagagagaagcattctcagaaacgtctttgtgatgtttgcattcaactcatagagttgaacattccctttcagagatcagctttgaagcactctttttgtagcatgtgcaagtggacatttggagcgccctgaggcctacggggaaaaagcaaatatcttcccataaccactagacagaaacattctcagaaactcctttatgacgtatgtactcaactaacagagaagaaccttccttttgacagagcatttttgatacactctttttgtagaatctgcaagtggatatttggatagctgtgaagatttcattggaaacgggaatatcttcctataaaatctagacagaagtattctcagaaactgctctgtgatgtctgcattcaagtcacagagttgaacattgcctttcatagagcaggtttgaaaccctctttttgtagtatatggaagtggacgtttcggacggtttgaggcccatggtgataaagggaatatcttcccctaccagctggaaagaagcattctgtgaaacttgtttgtgatgtgtgtactcaactaacagagttgaacctttctttttacagagcagttttgaaatactctttttgtagaatctgcgaggggatatttggatagatttcaggatttcgttggaaacgggaatatcttcatataaaatctcgacagaagcattctcagaaacttctttgtgatatgtgcattcaagttacagagttgaatattccctttcacagagtaggtttgaaacactctttttgtagtatctggaagtggacatttggagcgccttgacgcctacggtgaaaagggaaatatcttctcataaaaagtagacagaagcaatctcagaatcttctttgggatatatgcacgcagctaacagagttgaacctttctattgacagagcagttttgaaacagtctttctgtggaatctgcaagtggatattgggaatgcttggaggatttcgttggaaacgggattacgtataaaaagtagacagcagcatcctccgaaacttctttgtgatgtgtgcattcaagtcacagagttgaacattccctttcgtacagcagtttggaaacactctttctgtagtatctggaagtgaacattaggacagctttcaggtctatggtgagaaaggaaatatcttcaaataaaaactagacagaagcattctcataaacttgtttgtgatgtgtgaactcagctaacagaggtggatctttcctttgatagagcagttctgaaaaacactttttgttgaatctgcaagtggacatctggatagatttgaagatttcgttggaaacgggaatatcttcatatcaaatctagacagaagcattctcagaaacgtctttgtgatgtttgcattcaactcatagagttgaacattccctttcagagagcagctttgaagcactctttttgtagcatgtgcaagtggatatttggagcgctctgaggcctacggtgaaaaagcaaatatcttcccataaccactagacagaaacattctcagaaactcctttatgacgtgtgcactcacctaacagagaagaaccttccttttgacagagcagttttgatacactctttttgtagaatctgcaagtggatatttggatagctgtgaagatttcgttggaaactggaatatcttcctataaaatctagacagaagcattctcagaaactgctctgtgatgtctgcattcaagtcacagagttgaacattgcctttcatagagcaggtttgaaacgctctttttgtagtatagggaagtggatgtttcggacggttggaggcccatggtgataaagggaatatcttcccctgcaagctagaaagaagcattgtgtgaaacttgtttgtgatgtgtgtactcaactaacagagttgaacctttcttttcacagagcagttttgaaacactctttttgtagaatctgcgaggggatatttggatagatttcaggatttcgttggaaacgggaatatcttcatataaaatctcgacagaagcattctcagaaacttctttgtgatatgtgcattcaagtcacagagttgaatattccctttcacagagtaggtttgaaacactctttttgtagtatctggaagtggacatttggagcgccttgacgcctacggtgaaaagggaaatatcttcccataaaaactagacagcagcaatctcagaatcttctttgggatatatgcacgcagctaacagagttgaacctttctattgacagagcagttttgaaacagtctttctgtggaatctgcaagtggatatttggatagcttggaggatttcgttggaaacgggattacgtataaaaagtagagagcagcatcctcagaaacttctttgtgatgtgtgcattcaagtcacagagttgaacattccctttcgtacagcagttttgaaacactctttctgtagtatctggaagtgaacattaggacagctttcaggtctttggtgagaaaggaaatatcttcaaataaaaactagacagaagcatactcataaacttgtttgtgatgtgtgaactcagctaacagaggtggatctttcttttgatagagcagttctgaaaaacactttttgttgaatctgcaagtggacatttggatagatttgaagatttcgttggaaacgggaatatcttcatatcaaatctagacagaagcattctcagaaacgtctttgagatgtttgcattcaactcatagagttgaacattccgtttcagagagcagctttgaagcactctttttgtactatgtgcaagtggatatttggagcgctctgaggcctacggtgaaaaagcaaatatcttcccataaccactagacagaaacattctcagaaattcctttatgacgtatgcactcacctaaaagagaagaaccttccttttgacagagcagttttgatacactctttttgtagaatctgcaagtggatatttggatagctgtgaagatttcgttggaaacgggaatatcttcctataaaatctagacagaagcattctcagaaactgctctgtgatgtctgcattcaagtcacagagttgaacattgcctttcctagagcaggtttgaaacgctctttttgtagtatatggaagtggacgtttcggacggtttgaggcccatggtgacaaagggaatatcttcccctacaagctagaaagaagcattctgtgaaacttgtttgtgatgtgtgtactcaactaagagagttgaacctttcttttcacagagcagttttgaaacactctttttgtagaatctgcgaggggatatttggatagatttcaggatttcgttggaaacgggaatatcttcatataaaatctcgacagaagcattctcagaaacttctttgtgatatgtgcattcaagtcacagagatgaatattccctttcacagagtaggtttgaaacactctttttgtagtatctggaagtggacatttggagcgccttgacgcctacggtgaaaagggaaatatcttcccataaaaactagacagaagcaatctcagaattttctttgggatatatgcacatagctaacagagttgaacctttctttttacagagcagttttgaaacactctttttgtagaatctgcaagtggatatttggatagcttggaggatttcgttggaaacgggattacgtataaaaaatagacggcagcatcctcagaaacttctttgtgatgtgggcattcaagtcacagagttgaacattccctttcgtacagcagttttgaaacactctttctgtagtatctggaagtgaacattaggacagctttcaggtctatggtgagaaaggaaataccttcaaataaaaactagacagaagcattctcataaacttgtttgtgatgtgttaactcagctaagagacgtggatctttcttttgatagagcagttctgaaaaacacattttgttgaatctgcaagtggacatttggatagatttgaagatttcgttggaaacgggaatatcttcatatcaaatctagacagaagcattctcagaaacgtctttgtgatgtttgcattcaactcatagagttgaacattccgcttcagagagcagctttgaggcactctttttgtagtatgtgcaagtggatatttggagcgctctgaggcctacggtgaaaaagcaaatatcttcccataaccactagacagaaacattctcagaaactgctttatgacgtatgcactcacctaacagagaagaaccttccttttgacagagcagttttgatacactctttttgtagaatctgcaagtggatattgggatagctgtgaagatttcgttggaaacgggaatatcttcctataaaatctagacagaagcattctcagaaactgctctgtgatgtctgcattcaagtcacagagttgaacattgcctttcatagagcaggtttggaatgctctttttgtagtatatggaagtggacgtttcagacggtttgaggcccatggtgataaagggaatatcttcccctacaagctagaaagaagcattctgtgaaacttgtttgtgatgtgtgtactcaactaacagagttgaacctttctttttacagagcagttttgaaacactctttttgtagaatctgcgtggggatatttggatagatatcaggatttccttggaaacgggaatatcttcttttaaaatctcggcagaagcattctcagaaacttctttgtgatatctgcattcaagtcacagagttgaatattccctttcacagagtaggtttgaaatactctttttgtagtatctggaagtggacatttggagcgccttgacacctaaagtgaaaaggtaaatatcttcccataaaaactagacagaagcaatctcagaatattctttgggatatatgcacgcagctaacagagttaaacctttctattgacagagcagttttgaaacagtctttctgtggaatctgcaagtggatatttggatagcttggaggatttcgttggaaacgggattacgcataaaaagtagacagcagcatcctcagaaacttctttgtgatgtgtgcattcaagtcacagagttgaacattccctttcgtacagcagttttgaaacactctttctgtagtatctggaagtgaacattaggacagctttcatctctatggtgagaaaggaaatatcttcaaataaaaactagacagaagcattctcataaacttgtttgtgatgtgtgaactcagctaacagaggtggatctttcttttcatagagcagttctgaaaaacaccttttgttgaatctgcaagtggacatttggatagatttgaagatttcgttggaaacgggaatatcttcatatcaaatctagacagaagcattctcagaaacgtctttgtgatgtttgcattcaactcatagatttgaacattccctttcagagagcagctttgaagcactctttttgtagtatgtgcaaggggatatttggagctctctgaggcctaaggtgaaaaagcaaatatcttcccataaccactagacagaaacattctcagaaacttctttatgacgtatgtactcaactagcagagaagaactttccttttgacagagcacttttgatacattctttttgtagtatctgcaagtggatatttggatagctgtgaagatttcgttggaaacggcaatatcttcctataaagtctggacagaagcattctcagaaactgctctgtggtgtctgcattcaagtcacagagttgaacattgcctttcatagagcaggtttgaaacgctctttttgtagtatatggaagtggatgtttcggacggttggaggcccatggtgataaagggaatatcttcccctacaagctagaaagaagcattctgtgaaacttgtttgtgatgtgtgtactcaactaacggagttgaacctttctttttacagagcagttttgaaacactctttttgtagaatctgcgaggggatatttggatagatttcaggatttcgttggaaacgggaatatcttcatagaaaatactcgacagaagcattctcagaagcttctttgtgatatgtgcattcaagtcacagagttgaatattccctttcacagagtaggtttgaaacattctttttgtagtatctggaagtggacatttggagcaccttgacgcctacggtgaaaagggaaatatcttctcatgaaaagtagacagaagcaatctcagaatcctctttgggatacatgcacccagctaagagagttgaacctttctattgaccgagcagttttgaaacagtctttctgtggaatctgcaagtggatatttggatagcttggaggatttcgttggaaacaggatcacgtataaaaagtagacagcagcatcctcagaaacttctttgtgatgtgtgcattcaagtcacagagttgaacatcacctttcgtacagcagttttgaaacactcattctgtagtatctggaagtgaacattgggatagctttcaggtctatggtgagaaaggaaatatcttcaaataaaaactagacagaagcattttcataaacttgtttgtgatgtgtgaactcagctaacagaggtggatctttcttttgatagagcagttctgaaaaacactttttgttgaatctgcaagtggacatttggatagatttgaagatttcgttggaaacggggatatcttcatatcaaatactagacagaagcattctcggaaacgtctttgtgatgtttgcattcaactcatagagttgaacattccgtttcagagagcagctttgaggcactcattttgtagtatgtgcaagtggatatctggagcgctctgaggccttcggtgaaaaagcaaatatcttcccataaccaccagaaagaaacattctcagaaactcctttatgacgtatgcactcacctaacagagaagaaccttcctttggacagagcagttttgatacatactttttgtagaatctgaaagtggatatttggatagctgtgaagatttcgttggaaacgggaatatcttcctataaaatctagacagaagcattctcagaaagtgctctgtgatgtctgcattcaagttacagagttgaacattgcctttcatagagcaggtttgaaacactctttttgtagtatatggaagtggacgtttcggacggtttgaggcccatggtgataaagggaatatcttctcctacaagctagaaagaagcattgtgtgaaacttgtttgtgatgtgtgtactcaactaacagagttgaacctttcttttcacagagcagttttgaaacactctttttgtagaatctgcgaggggatatttggatagatttcagcatttcgttggaaacgggaatatcttcatataaaatctcgacagaagcattctcagaaacttctttgtgatatctgcattcaagtcacagagttgaatattccctttcacagagtaggtttgaaacactctttttgtagtatctggaagtggacatttggagcgccttgacgtctacggtgaaaagggaaatatcttcccataaaaactagacagaagcaatctcagaatcttctttgggatatatgcacgcagttaacagagttgaaactttctattgacagagcagttttgaaacagtctttctgtggaatctgcaagtggatatttggatagcttggaggatttcgttggaaacgggattacgtataaaaagtagacagcagcatcctcaggaaacttctttgtgatgtgtgcattcaagtcacagaagttgaacattccctttcgtacagcagttttgaaatactctttctgtagtaactggaagtgaacattaggacagctttcaggtctatggtgagaaaggaaatatcttcaaataaaaactagacagaagcattctcataaacttgtttgtgatgtgtgaactcagctaacagaggtggatctttcttttgatagagcagttctgaaaaacactttttgttgaatctgcaagtggacatttggatagatttgaagatttcgttggaaacgggaataacttcatatcaaatctagacagaagcattctcagaaacgtctttgtgatgtttgcattcaactcatagagttgaacattccgtttcagagagcagctttgaagcactctttttgtagtatgtgcaagtggatatttggagcgctgtgaggcctacggtgaaaaagcaaatatcttcccataaccactagacagaaacattctcagaaactcctttatgacgtatgcactcacctaacagagaagaaccttccttttgacagagcagttttgatacactctttttgtagaatctgcaagtggatatttggatagctgtgaagatttcgtcggaaacgggaatatcttcccataaaatctagacagaagcattctcagaaactgctctgtgatgtctgcattcaagtcacagagttgaacattgcctttcatagagcaggtttgaaacgctctttttgtagtatatggaagtggacgtttcagacggtttgcggcccatggtgttaaagggaatatcttcccctacaagctagaaagaagcattctgtgaaacttgtttgtgatgtgtgtactcaactaagagagttgaacctttctttttacagagcagttttgaaacacactttttgtagaatctgcgaggggatatttggatagatttcaggatttcgttggaaacgggaatatcttcatttaaaatctcgacagaagcattctcagaaacttctttgtgatatctgcattcaagtcacagaggtgaatattccctttcacagagtaggtttgaaacactctttttgtagtatctggaagtggacatttggagcgccttgacgcctacggtgaaaagggaaatatcttcccataaaaactagacagaagcaatctcagaatcttctttgggatatatgcacgcagctaacagagttgaacctttctattgacagagcagttttgaaacagtctttctgtggaatctgcaagtggatatttggatagattggaggatttcgttggaaacgggattacgtatcaaaagtagacagcagcatgctcagaaacttctttgtgatgtgtgcattcaagtcacagagttgaacattccctttcgtacagcagttttgaaacactctttctgtagtatctggaagtgaacattaggacagctttcaggtctatggtgagaaaggaaatatcttcaaataaaaactagacagaagcattctcaaaaacttgtttgtgatgtgtgaactcagctaacagaggtggatctttcttttgatagagcagttctgaaaaacacgttttgttgaatctgcaagtggacatttggatagatttgaagatttcgttggaaacgggaatatcgtcatatcaaatctagaaagaagcattctcagaaacgtctttgtgatgtttgcattcaactcatagagttgaacattccctttcagagagcagatttgaagcactctttttgtagtatgtgcaaggggatatatggagcgctctgaggcctaaggtgaaaaagcaaatatcttcccataaccactagacagaaacattctcagaaactcctttatgacgtatgtactcaactaacagaggagaaccttccttttgacagagcagttttgatacactctttttgtagaatctgcaagtggatatttggatagcttggaagatttcgttggaaaagggaatatcttcctataaaacctagacagaagcattctcagaaactgctctgtgatgtctgcattcaagtcacagagttgaacattgcctttcatagagcaggtttgaaacgctctttttgtagtatatggaagtggatgtttcggacgcttggaggcccatggtgataaagggaatatcttcccctacaagctagaaagaagcattctgtgaaacttgtttgtgatgtgtgtactcaactaacagagttgaacctttctttttacagagcagttttgaaacaccctttttgtagaatctgcgaggggatatttggatagatttcaggatttcgttggaaacgggaatatcttcatataaaatctcgacagaagcattctcagaaacttctttgtgatatgtgcattcaagtcacagagttgaatattccctttcacagactaggtttgaaaaaccctttttgtagtagtctggaagtggacatttggagcgccttgacgcctacggtgaaaagggaaatatcttctcataaaaagtagacagaagcaatctcagaatcttctttgggatatatgcacgcagctaacagagttgaacctttctattgacagagcagttttgaaacagtctttctgtggaatctgcatgtggatatttggatagcttggaggatttcgttggaaacgggattacgtataaaaagtagacagcagcatcctcagaaacttctttgtgatgtgtgcattcaagtcacagagttgaatattccctttcgtacagcagttttgaaacactctttctgtagcatctggaagtgaacattagaacagctttcaggtctatggtgagaaaggaaatatcttcaaataaaaactagacagaagcattctcataaacttgtttctgatgtgtgaactcagctaacagacgtggatctttcttttgatacagcagttttgaaaaacactttttgttgaatctgcaagtggacatttggatagatatgaagatttcgttggaaacgggaatatcttcatatcaaatctagacagaagcattctcagcaaacgtctttgtgatgtttgcattcaactcatagagttgaacattccgtttcagagcagcagctttgaagcactctttttgtagtatgtgcaagtggatatttggatcgctgtgaggcctaaggtgaaaaagcaaatatcttcccataaccactagacagaaacattctcagaaacgcctttatgacgtatgcactcacctaacagaaaagaacctttcttttgacagagcagttttgatacactctttttgtagaatctgcaagtggatatttggatagctgtgaagatttcgttggaaacgggaatatcttcctataaaatctagacagaagcattctcagaaactgctctgtgatgtctgcattcaagtcacagagttgaacattgcctttcatagagcaggtttgaaacgctctttttgtagtatatggaagtggatgtttcggacggttggaggcccatggtgataaagggagtatcttcccctacaagctagaaagaagcattctgtgaaacttgtttgtgatgtgtgtactcaactaacagagttgaacctttctttttacagagcagttttgaaacactctttttgtagaatctgcgaggggataattggatagatttcaggatttcattggaaacgggaatatcttcatataaaatctcgacagaagcattctcagaaacttctttgtgatatgtgcattcaagtcacagagttgaatattccctttcacagagtaggtttgaaacaccctttttgtagtatctggaagtggacatttggagcgccttgacacctacggtgaaaagggaaatatcttcccataaaaactagacagaagcaatctcagaatcttctttgggatatatgcacgcagctaacagagttgaacctttctattgacagagcagttttgaaacactctttctgtggaatctgcaagtggatatttcgatagcttggaggatttcgttggaaacgggattacgtataaaaagtagacagcagcatcctcagaaacttctttgtgatgtgtgcattcaagtcacagagttgaacattccctttcgtacagcagttttgaaacactctttctgtagtatctggaagtgaacattaggacagctttcaggtctatggtgagaaaggaaatatcttcaagtaaaaactagacagaagcattctcataaacttgtttgtgatgtgggaactcagctaacagaggcggatctttctgttgatagagcagttcggaaaaacactttttgttgaatctgcaagtggacatttggatagatttgaagatttcgttggaaacgggaatatcttcatatcaaatctagacagaagcattctcagaaacgtctttctgatgtttgcattcaactcatagagttgaacattccctttcagagagcagctttgaagcactctttttgtagtatgtgcaaggggatatatggagcgctctgaggcctaaggtgaaaaagcaaatatcttcccataaccactagacagaaacattctcagaaactcctttatgacgtatgcactcacctaacagagaagaaccttccttttgacagagcagttttgatacactctttttgtagaatctgcaagtggatattgggatagctgtgaagatttcgttggaaacgggaatatcttcctataaaatctagacagaagcattctcagaaactgctctgtgatgtctgcattcaagtcacagagttgaacattgcctttcctagagcaggtttgaaacgctctttttgtagtatatggaagtggacgtttcggacggtttgaggcccatggtgataaagggaatatcttcccctataagctagaaagaagcattctgtgaaacttgtttgtgatgtgtgtactcaactaacagagttgaacctttctttttacagagcagttttgaaacactctttttgtagaatctgcgaggggatatttggatagatttcaggatttcgttggaaacgggaatatcttcatagaaaatgctcgacagaagcattctcagaaacttccttgtgatatgtgcattcaagtcacagagttgaatattccctttcacagagtaggtttgaaacactctttttgtagtatctggaagtggacatttggagcgccttgacgcccacggtgaaaagggaaatatcttcccataaaaactagacagaagcaatctcagaatcttctttgggatatatgcacgcagctaacagagttgaacctttctattgacagagcagttttgaaacagtctttctgtggaatctgcaagtggatatttggatagcttggaggatttcgttggaaacgggattaagtataaaaagtagacagcagcatcctcagaaacttctttgtgatgtgtgcattcaagtcacagagttgaacattcccttttgtacagcagttttgaaacactctttctgtagtatctggaagtgaacattaggacagctttcaggtctatggtgagaaagaaaatatcttcaaataaaaactagacaaaagcattctcataaacttgtttgtgatgtgtgaactcagctaacagaggtggatctttcttttgatagagcagttctgaaaaacactttttgttgaatctgcaagtggatatttggatagatttgaagatttcgttggaaacgggaatatcttcatatcaaatctagacagaagcattctcagaaacgtctttgtgatgtttgcattcaactcatagagttgaacattccctttcagagaggagctttgaagcactctttttgtagtatgtgcaaggggatatttggagcgctctgaggcctaaggtgaaaaagcaaatatcttcccataaccactagacagaaacattctcagaaatttctttatgacgaatttactcaactagcagagaagaactttccttttgacagagcacttttgatacactcttttttagtatctgcaagtggatatttggatagctgtgaagatttcgttggaaacgggaatatcttcctataaactctggacagaagcattctcagaaactgctctgtgatgtctgcattcaagtcacagagttcaacattgcctttcatagagcaggtttgaaacgctctttttgtagtatatggaagtggatgtttcggacggttggaggcccatggtgacaaagggaatatcttcccctacaagctagaaagaaagcattctgtgaaacttgtttgtgatgtgtgtactcaactaacaggagttgaacctttctttttacagagcagttttgaaacactctttttgtagaatctgcgaggggatatttggatacatttcagcatttcgttggaaacgggaatatcttcatataaaatctcgacagaagcattctcagaaacttctttgtgatatgtgcattcaagtcacagagttgaatattccctttcccagagtaggtttgaaacactctttttgtagtatctggaagtggacatttggagcgccttgacacctacggtgaaaagggaaatatcttcccataaaaactagacagaagcaatctcagaatcttctttgggatatatgcacgcagctaacagagttgaacctttctattgacagagcagttttgaaacagtctttctgtgcaatctgcaagtggatatttggatagcttggaggatttcgttggaaacgggattacgtataaaaagtagacagcagcatcctcagaaacttctttgtgatgtgtgcattcaagtcacagagttgaacattccctttcgtacagcagttttgaaacactctttctgtagtatctggaagtgaacattaggacagctttcagttctatggtgagaaaggaaatatcttcaaataaaaactagacagaagcattctcatcaacttgtttgtgatgtgtgaactcagctaacacacgtggatctttcttttgatagagcagttctgaaaaacactttgttgaatctgcaagtggacatttggatagatttcaagatttcgttggaaacgggaatatcttcatatcaaatctagacagaagcattctcagaaacgtctttgtgatgtttgcattcaactcatagaattgaacattgcggttcagagagcagctttgaagcactctttttgtagtatgtgcaagtggatatttggagcgctctgaggcctaaggtgaaaaagcaaatatcttcccataaccactagacagaaacattctcagaaacttctttatgacgtatgtactcaactagcagagaagaactttccttttgacagagcacttttgatacactctttttgtagtatctgcaagtggatatttggatagctgtgaagatttcgtttgaaacgggaatatcttcctataaagtctggacagaagcattctcagaaactgctctgtgatgtctgcattcaagtcacagagttgaacattgcctttcatagagcaggtttcaaacactctttttttagtatatggaagtggacgtttcggacggtttgaggaccatggtgataaaggaaatatcttcccctacaagctagaaagaagcattgtgtgaaacttgtttgtgatgtgtgtactcaactaacagagttgaacctttctttttacagagcagttttgaaacactctttttgtagaatctgcaaggggatatttggatagatttcaggatttcgttggaaacgggaatatcttcatataaaatctcgacagaagcattctcagaaacttctttgtgatatctgcattcaagtcacagagttgaatattccctttcacagagtaggtttgaaacactctttttgtagtatctggaagtgggcatttggagcgctttgacgcctacggtgaaaagggaaatatcttcccataaaaactagacagaagcaatctcagaatcttctttgggatatatgcacgcagctaacagagttgaacctttctattgacagagcagttttgaaacaatctttctgtggaatctgcaagtggatatttggatagcttggaggatttcgttggaaacgggattacgtataaaaagtagacagcagcatcctcaggaacttctttgtgatgtgtgcattcaagtcacagagttgaacattcccttccgtacagcagttttgaaacactctttctgtagtatctggaagtgaacattaggacagctttcaggtttatggtgagaaaggaaatatcttcaaataaaaactagacagaagcattctcataaacttgttcgtaatgtgtgaactcagctaacacacgtggatctttcttttgatagagcagttctgaaaaacacttttttttgaatctgcaagtggacatttggatagatttgaagatttcgttggaaacgggaatatcttcatatcaaatctagacagaagcattctcagaaacgtctttgtgatgtttgcattcaactcatagagttgaacattccgtttcagagagcagctttgaagcactctttttgtagtatatgcaagtggatatttggagcgctctgaggcctacggtgaaaaagcaaatatcttcccataaccactagacagaaacattctcagaaactcctttatgacggtatgcactcacctaacagagaagaaccttccttttgacagagcagttttgatacactctttttgtagaatctgcaagtggatatttggatacctgtgaagatttcgttggaaacgggaatatcttcctataaaatctagacagaagcattctcagaaactgctctgtgatgtctgcattcaagtcacagagttgaacattgcctttcatagagcaggtttgaaatgctctttttgtagtatatggaagtggacgtttcagacggtttgaggcccatggtgataaagggaatatcttcccctaaaagctagaaagaagcattctgtgaaacttgtttgtgatgtgtgtactcaactaacagagttgaacctttctttttacagagcagttttgaaacactctttttgtagaatctgcgaggggatatttggatagatttcaggatttcgttggcaacgggagtatcttcacataaaatctcgacagaagcattctcagaaacttccttgtgatatgtgcattcaagtcacagagttgaatattccctttcacagagtaggtttgaaacactctttttgtagtatctggaagtggtcatttggagcgccttgacgccacggtgaaaagggaaatatcttcccataaaaactagacagaagcaatctcagaatcttctttgggatatatgcatgcagctaacagagttgaacctttctattgacagagcagttttgaaacagtctttctgtggaatctgcaagtggatatttggatagcttggaggatttcgttggaaacggtattacatataaaaagtagacagcagcatactcagaaacttctttgtgatgtgtgcattcaagtcacagagttgaacattccctttcgtacagcagttttgaaacactctttctgtagtatctggaagtgaacattaggacagctttcaggtctatggtgagaaaggaaatatcttcaaataaaaactagacagaagcattctcataaacttgttcgtaatgtgtgaactcagctaacacacgtggatctttcttttgatagagcagttctgaaaaacactttttgttgaatctgcaagtggacatttggatagatttgaagatttcgttggaaacgggaatatcttcatatcaaatctagacagaagcattctcggaaacgtctttgtgatgtttgcattcaactcatagagttgaacattccgtttcagagagcagctttgaagcactctttttgtagtatgtgcaaggggatatttggagcgctctgaggcctaaggtgaaaaagcaaatatcttcccataaccactaaacagaaacattctcagaaacttctttatgacgtatgtactcaactagcagagaagaactttccttttgagagagcatttttgatacactctttttgtagtatctgcaggtggatatttggatagctgtgaagatttcgttggaaacgggaatatcttcctataaagtctggacagaagcattctcagaaactgctctgtgatgtctgcattcaagtcacagagttgaacattgcctttcctagaacaggtttgaaacgctctttttgtagtatatggaagtggacgtttcggcctgtttgaggcccatggtgataaagggaatatcttcccctacaagctagaaagaagcattgtgtgaaacttgtttgtgatgtgtgtactcaactaacagagttgaacctttctttttacagagcagttttgaaacactctttttgtagaatctgcgaggggaaatttggatagatttcaggatttcgttggaaacgggaatatcttcatataaaatctcgacagaagcattctcagaaacttctttgtgatatctgcattcaagtcacagagttgaatattccctttcacagagtaggtttgaaacactctttgtagtatctggaagtggacatttggagcgccttgacgcctacggtgaaaagggaaatatcttcccataaaaactagacagaagcaatctcagaatcttctttgggatatatgcacgcagctaacagagttgaacctttctattgacagagcagttttgaaacagtctttctgtggaatctgcaaatggatatttggatagcttggaggatttcgttggaaacgggattatgtataaaaagtagacagcagcatcctcagaaacttctttgtgatgtgtgcattcaagtcccagagttgaacattccctttcgtacagcagttttgaaacactctttctgtagtatctggaagtgaacattaggacagctttcaggtctatggtgagaaaggaaatatcttcaaataaaaactagacagaagcattctcataaacttgtttgtgatgtctgaactcagctaacagaggtggatctttcttttgatagagcagttctgaaaaacacttttggttgaatctgcaagtggacatttggatagatttgaagacttcgttggaaacgggaatatcttcatatcaaatctagacagaagcattctcagaaatgtctttgtgatgtttgcattcaactcatagagttgaacattccgtttcagagaccagctttgaagcactctttttgtagtatgtgcaagtggatatttggagcgctctgaggcctacggtgaaaaagcaaatatcttcccataaccactagacagaaacattctcagaaacttctttatgacgtatgtactcaactagcagagaagaactttccttttgacagagcatttttgatacactctttttgtactatctgcaagtggatatttggatagctgtgaagatttcgttggaaacgggaatatctccctataaagtctggacagaagcattctcagaaactgctctgtgatgtctgcattcaagtcacagagttgaacattgcctttcatagagcaggtttgaaacgctctttttgtattatatggaagtggatgtttcggacggttggaggcccatggtgataaagggaatatcttcccctacaagctagaaagaagcattctgtgaaacttgtttgtgatgtgtgtactcaactaacagagttgaacctttctttttacagagcagttttgaaacactctttttgtagaatctgcgaagggaaatttggatagatttcaggatttcgttggaaacgggaatatcttcatacaaaatctcgacagaagcattctcagaaacttctttgtgatatgtgcattcaagtcacagagttgaatattcccgttcacagagtaggtttgaaacactctttttgtagtatctggaagtggacatttggagcgccttgactcctaccgcgtgaaaagggaaatatcttcccataaaaactagacagaagcaatctcagaatcttctttgtgatatatgcacgcagctaacagagttgaacctttctattgacagagcagttttgaaacagtctttctgtggaatctgcaagtggatatttggatagcttggaggatttcgttggaaacgggattatgtataaaaagtagacagcagcatcctcagaaacttctttgtgatgtgtgcattcaagtcacagagttgaacattccctttcgtacagcagttttgaaacactctttctgtagtatctggaagtgaacattaggagagctttcaggtctatgttgagaaaggaaatatcttcaaataaaaactagacagaaagcattctcataaacttctttgtgatgtgtgaactcagctaaccgaggtggatctttcttttgatagagcagttctgaaaaaaactttttgttgaatctgcaagtggacatttggatagatttgaagatttcgttgggaacgggaatatcttcatatcaaatctagacagaagcattctcggaaacgtctttgtgatgtttgcattcaactcatagagttgaacattccgtttcagagagcagctttgaagcactctttttgtagtatgtgcaagtggatatttggagcgctctgaggcctacggtgaaaaagcaaatatcttcccataaccactagacagaaagattctcagaaactcctttatgacgtatgcactcacctaacagagaagaaccttccttttgacagagcagttttgatacactctttttgtagaatctgcaagtggatatttggatagctgtgaagatttcgttggaaacgggaatatcttcctataaaatctagacagaagcattctcagaaactgctctgtgatgtctgcattcaagtcacagagttgaacattgcctttcctagagcaggtttgaaacgctctttttgtagtatatggaagtaaacgtttcggacggtttgaggcccatggtgataaagggaatatcttcccctacaagctagaaagaagcattgtgtgaaacttgtttgtgatgtgtgtactcaactaacagagttgaacctttctttttacagagcagttttgaaacactctttttttagaatctgcgaggggatatttggatacatttcaggatttcgttggaaacgggaatatcttcatataaaatctcgacagaagcattctcagaaacttctttgtgatatgtgcattcgagtcacagagttgaatattccctttcacagagtaggtttgaaacactctttttgtagtatctggaagtggacatttggagcgccttgacgcctacggtgaaaagggaaatatcttcccataaaaactagacagaagcaatctcagaatcttctttgtgatatatgcacgcagctaacagagttgaacctttctattgactgagcagatttgaaacagtctttctgtggaatctgcaagtggatatttggatagcttggaggatttcgttggaaacgggattacgtataaaaagtagacagcagcatcctcagaaacttctttgtgatgtgtgcattcaagtcacagagttgaacattccctttcgtacagcagttttgaaacactctttctgtagtatctggaagtgaacattaggatagctttcaggtctatggtgagaaagggaatatcttcaaataaaaactagacagaagcattctcataaacttgtttgtgatgtgtgaactcagcaaacagcggtggatctttcttttgatagagcagttctgaaaaacactttttgttgaatctgcaagtggacatttggatagttttgaaggtttcgttggaaacgggaatatcttcatatcaaatctagacagaaaggattctcggaaacgtctttgtgatgtttgcattcaactcatagagttgaacattccctttcagagaacagctttgaagcactctttttgtagtatgtgcaaggggatatttggagcgctctgaggcctaaggtgaaaaagcaaatatcttcccataaccactagacagaaacattgctcagaaactcctttatgacgtatgcactcacctaacagagaagaaccttccttttgacagagcagttttgatacactctttttgtagaatctgcaagtggatatttggatagctgtgaagatttcgttggaaacgggaatatcttcctataaaatctagacagaagcattctcagaaactgctctgtgatgtctgcattcaagtcacagagttgaacattgcctttcatagagcaggtttgaaactctctttttgtagtatatggtagtagacgtttcggacggtttgaggcccatggtgataaagggaatatgttaccctacaagctagaaagaagcattctgtgaaacttgtttgtgatgtgtgtactcaactaacagagttgaacgtttctttttacagagcagttttgaaacactctttttgtagaatctgcgaggggatatttggatacatttcaggatttcgttggaaacgggaatatcttcatataaaatctcgacagaagcattctcagaaacttctttgtgatatgtgcattcaagtcacagagttgaatattccctttcacagagtaggtttgaaacactctttttgtagtatctggaagtggacattttgaacgccttgacacctacggtgaaaagggaaatatcttcccataaaaactagacagaagcaatctcagaatcttctttgggatatatgcacgcaactaacagcagttgaacctttctattgacagagcagttttgaaacagtctttctgtggaatctgcaagtggatatttggatagcttggaggatttctttggaaatgggattacgtataaaaagtagacagcagcatcctcagaaacttctttgtgatgtgtgcattcaagtcacagagttgaacattccctttcgtacagcagttttgaaacactctttctgtagtatctggaagtgaactttaggacagctttcaggtctatagtgagaaaggatatatcttcaaataaaaactagacggaagcattctgataaacttgtttgtgaagtgtgaactcagctaacagaggtggatctttctttcgaaacagcagtttcgaaaaacactttttgttgaatctgcaagtggacatttgaatagatttgaagatttcgttggaaagaggaatatcttcatatgaaatctagacagaagcattctcagaaacgtctttgtgatgtttgcattcaactcatagagttgaacattccgtttcagagaacagctttgaagcactctttttgtagtatgtgcaagtggatatttggagcgctctgaggcctacggggttaaagaaaatgtctaaccataaccactagactgaaacattctcagaaactcctttatgacgtttgtactcaactaacagagaagaacgttcctattgacagagcagttttgatacactctttttgtagaatctgcaagtggatatttggatagctgtgaagatttcgttggaaacgggaatatcttcctataaaatctagacagaagcattctcagaaactgctctgtgatgtctgcattcaagtcacagagttgaacattgcctttcctagagcaggtttgaaacgctctttttgtagtatatggaagtggacttttcggacggtttgaggcccatggtgataaagggaatatcttcccctacaagctagaaagaagcattctgtgaaacttgtttgtgatgtgtgtactcaactaacagagttgaacctttctttttacagagcagttttgaaacactctttttgtagaatctgcgaggggatatttggagagacttcaggatttcgttggaaacgggaatatcttcatataaaatctcgacagaagcattctcagaaacttctttgtgatatctgccttcaagtcacagagttgaatattccctttcacagagtaggtttgaaacactctttttgtagtatctggaagtggacatttggagcgcctcgacacctacggtgaaaagggaaatatcttcccataaaaactagacagaagcaatctcagaatcttctttgggatatatgcacgcagctaacagagttgaacctttctattgacagagcagttttgaaacagtctttctggggaatctgcaagtggatatttggatagcttggaggatttcgttggaaacaggattacgtataaaaagtagacagcagcatcctcagaaacttctttgtgatgtgtgcattcaagtcacagagttgaacattccctttcgtacagcagttttgaaacactctttctgtagtatctggaagtgaacattagaacagctttcagctctatggtgagaaaggaaatatcttcaaataaaaactagacagaagcattctcataaacttgtttgtgatgtgtgaactcagctaacagaggtggatctttcttttgatagagcagttctgaaaaacacgttttgttgaatctgcaagtggacatttggatagatttgaagatttcgttggaaacgggaatatcgtcatatcaaatctagacagaagcattctcagaaacgtctttgtgatgtttgcattcaactcatagagttgaacattccctttcagagagcagctttgaagcactctttttgtagcatttgcaagtggacatttggagcgccctgaggcatacggggaaaaagcaaatatcttcccataaccactagacagaaacattctcagaaactcctgtatgacgtgtgcactcacctaacagagaagaaccttccttttgacagagcagttttgatacactctttttgtagaatttgcaagtggatatttggatagctgtgaagatttcgttggaaacgggaatatcttcctataaaatctagacagaagcattctcagaaactgctctgtgatgtctgcattcaagtcacagagttgaacattgcctttcctagagcaggtttgaaacgctctttttgtagtatatgaaagtggacgtttcggacggtttgaggaccatggtgataaagggaatatcttcccctacaagctagaaagaagcattctgtgaaacttgtttgtgatgtgtgtactcaactaacagagttgaacctttcttttcacagagcagttttgaaacactctttttgtagaatctgcgaggggatatttggatagatttcaggatttcgttggaaaggggaatatcttcatataaaatctcgacagaagcattctcagaaacttctttgtgatatctgcctttaagtcacagagttgaatattccctttcacagagtaggtttgaaacactctttttgtagtatctggaagtggacatttggagcgccttgacacctacggtgaaaagggaaatatcttcccataaaaactagacagaaggaatctcagaatcttctttgggatatatgcacgcagctaacagagttgaacctttctattgacagagcagttttgaaacagtctttctgtggaatctgcacgtggatatttggatagcttggaggatttcgttggaaacgggattacgtataaaaagtagacagcagcatcctcagaaacttctttgtgatgtgtgcattcaagtcacagtgttgaacattccctttcgtacagcagttttgaaacactctttctgtagtatctggaagtgaacattaggacagctttcaggtctatggtgagaaaggaaatatcttcaaataaaaactagacagaagcattctcataaacttgtttgtgatgtgtgaactcagctaacagaggtggatctttcttttgatagagcagttctgaaaaacactttttgttgaatctgcaagtggacatttggatagatttgaagatttcgttggaaacgggaatatctatatatcaaatctagacagaagcattctcagaaacgtctttgtgatgtttgcattcaactcatagagttgaacattccgtttcagagagcaggtttgaagcactctctttgtagtatgtgcaagtggatatttggagggctctgaggcctacggtgaaaaagcaaatatcttcccataaccactagacagaaacattctcagaaactcctttatgacgtatgcactcacctaacagagaagaaccttccttttgacggagcagttttgatacactctttttgtagaatctgcaagtggatatttggatagctgtgaagatttcgttggaaacgggaatatcttcctataaaatctagacagaagcattctcagaaactgctctgtgatgtctgcattcaagtcacagagttgaacattgcctttcatagagcaggtttggaacgctctttttgtagtatatggaagtggacgtttcggacggtttgaggcccatggtgataaagggaatatcttcccctacaagctagaaagaagcattctgtgaaacttgtttgtgatgtgtgtactcaactaacagagttgaacctttctttttacagagcagttttgaaacactccttttgtagaatctgcgaggggatatttggatagatttcaggatttcgttggaaacgggaatatcttcatataaaatctcgacagaagcattctcagaaacttctttgtgatatctgcctttaagtcacagagttgaatattccctttcacagagtaggtttgaaacactctttttgtagtatctggaagtggacatttggagcgccttgacgcctacggtgaaaagggaaatatcttcccataaaaactagacagaagcaatctcagaatcttctttgggatatatgcacgcagctaacagagttgaacctttctattgacagagcagttttgaaacagtctttctgtggaatctgcaagtggatatttggatagctttgaggatttcgttggaaacgggattacgtataaaaattagacagcatcatcctcagaaacttctttgtgatgtgtgcattcaagtcacagagttgaacattccctttcgtacagcagttttgaaacactctttctatagtatctggaagtgaacattaggacagctttcaggtctatggtgagaaaggaaatatcttcaaataaaaactagacagaagcattctcataaacttctttgtgatgtgtgaactcagctaacagacgtggatctttcttttgatacagcagttttgagaaacactttgttgaatctgcaagtggacatttggatagatttgaagatttcgttggaaacgggtatatcttcatatcaaatctagacagaagcattctcagaaacgtctttgtgatgtttgcattcaactcatagagttgaacattccgtttcagagaccagctttgaagcactctttttgtagtatgtgcaagtggatatttggagcgcttctgaggcctacggtgaaaaagcaaatatcttcccataaccactagacagaaacattctcagaaaatcctttatgacgtatgcactcacctaacagagaagaaccttccttttgacagagcagttttgatacactctttttgtagaatctgcaagtggatatttggatagctgtgaagatttcgttggaaacgggaatatcttcctataaaatctagacagaagcattctcagaaactgctctgtgatgtctgcattcaagtcacagagttgaacattgcctttcatagagcaggtttcaaacactccttttttagtatatggaagtggacgtttcggacggtttgagtaccatggtgataaaggaaatatcttcccctacaagctagaaagaagcattctgtgaaacttgtttgtgatgtgtgtactcaactaacagagttgaacctttctttttacagagcagttttgaaacactctttttgtagaatctgtgaggggatatttggatagatttcaggatttcgttggaaacgggaatatcttcatataaaatctcgacagaagcattctcagaaacttctttgtgatatctgcattcaagtcacagagttgaatattccctttcacagagtaggtttgaaacactccttttgtagtatctggaagtggacatttggagcgccttgacgcctacggtgaaaagggaaatatcttcccataaaaactagacagaagcaatctcagaatcatctttgggatatatgcacgcagctaacagagttcaacctttctattgacagagcagttttgaaacagtctttctgtggaatctgcaagtggatatttggatagcttggaggatttcgttggaaacgggattacgtataaaaagtagacagcagcatcctcagaaacttctttgtgatgtgtgcattcaagtcacagagttgaacattccctttcgtacagcagttttgaaacactctttctgtattatctgggagtgaacattaggacagctttcaggtctatggtgagaaaggaaatatcttcaaataaaaaccagacagaagaattctgataaacttgtttgtgaagtgtgaactcagctaacagaggtggatctttcttttgatacagcagttttgaaaaacactttgttgaatctgcaagtggacatttggatagatttgaagatttcgttggaaacgggaatatcttcatatcaaatctagacagaagcattctcagaaacgtctttgtgatgtttgcattcaactgatagggttgaacattccctttcagagagcagctttgaagcaatctttttgtagcatgtgcaagtggacattttgagcgctctgaggcctatggtgaaaaagcaaatatcttcccataaccactagacagaaacattctcagaaacttctttatgacgtatgtactcaactagcagaaaagaactttccttttgacagagcttttttgatacactctttttgtagtatctgcaagtggatatttggatagctgtaaagatttcgttggaatcgggaatatcttcctataaagtctggacagaagcattctcagaaactgctctgtgatgtctgcattcaagtcacagagttgaacattgcctttcatacagcaggtttgaaatgctctttttgtagtatatggaagtggacgtttcagacggtttgaggcccatggtgataaagggaatatcttccgctacaagctagaaagaagcattctgtgaaacttgtttgtgatgtgtgtactcaactaacagagttaaacctttctttttacagaacagttttgaaacactcttgttgtagaatctgcgaggggatatttggatagatttcaggatttcgttggaaacgggaatatcttcatataaaatctcgacagaagcattctcagaaacttcattgtgatatgtgcattcaagtcacagagttgaatattccctttcacagagtaggtttgaaacactctttttgtagtatctggaagtggacatttggagcgctttgacgcctacggtgaaaagggaaatatcttctcataaaaactagacagaagcaatctcagaatcttctttgggatatatgcacgcagctaacagagttgaacctttctattgacagagcagttttgaaacagtctttctgtggaatctgcaagtggatatttggatagcttggaggatttcgttggaaacgggattacagtataaaaagtagacagcagcatcctcagaaacttccttgtgatgtgtgcattcaagacacacagttgaacattccctttcgtacagcagttttgaaacactctttctgtagtatctggaagtgaacattaggagagctttgaggtctatagtgagaaagggtatatcttcaaataaaaactagacagaagcattctcataaacttgtttgtgatgtgtgaactcatctaacagaggtggatctttcttttgatagagcagttctgaaaaacactttttgtggaatctgcaagtggacatttggatagatttgaagatttcgttggaaacgggaatatcttcatatcaaatctagacagaagcattctcagaaacctctttgtgatgtttgcattcaactcatagagttgaacattccgtttcagagagcagctttgaagcactctttttgtagtatgtgcaagtggatatttggagcgctgtgaggcctacggtgaaaaagcaaatatcttcccataaccactagacagaaacattctcagaaactcctttatgacgtatgcactcacctaacagagaagaaccttccttttgacagagcagttttgatacactctttttgtagaatctgcaagtggatatttggatagctgtgaagatttcgttggaaacgggaatttcttcctataaaatctagacagaggcattctcagaaacagctctgtgatgtctgcattcaagtcacagagttgaacattgcctatcatagagcaggtttgaaacgctctttttgaagtatatggaagtggacgtttcagacggtttgaggcccagggtgataaagggaatatattcccctacaagctagaaagaagcattctgtgaaacttgtttgtgatgtgtgcactcaactaacagagttgaacctttctttttacagagcagttttgaaacactctttttgtagaatctgtgaggggatatttggatacatttcaggatttcgttggaaacgggaatatcttcatataaaatctcgacagaagcattctcagaaacttctttgtgatatgtgcattcaagtcacagagttgaatattccctttcacagagtaggtttgaaacactctttttgtagtatctggaagtggacatctggagcgccttgacacctacggtgaaaagggaaatatcttcccataaaaactagacagaagcaatctcagaatcttctttgggatatatgcacgcagctaacagagttgaacctttctattgacagagcagttttgaaacagtctttctgtggaatctgcaagtggatatttggatagcttggaggatttcattggaaacgggattacgtataaaaagtagacagcagcatcctcagaaacttctttgtgatgtgtgcattcaagtcacagagttgaacattccctttcgtacagcagttttgaaacactctttctgtagcatctttaagtgaacattaggacagctttcaggtctatggtgagaaaggaaatatcttcaaataaaaactagacagaagcattctcataaacttgtttctgatgtgtgaactcagctaacagaggtggatctttcttttgatagagcagatctgaaaaacactttttgttgaatctgcaagtggacatttggatagatttgaagatttcgttggaaacgggaatatcttcatatcaaatctagacagaagcattgtcagaaacgtctttgtgatgtttgcattcaactcatagagttgaacattccctttcagagagcagctttgaagcactctttttgtagtatgtgcaagtggatatttggagcgctctgaggccttcggtgaaaaagcaaatatcttcccataaccactagacagaaacattctcagaaactcctttatgacgtatgcactcacctaacagagaagaaccttccatttgacagagcagttttgatacactctttttgtagaatctgcaagtggatatttggatagctgtgaagatttcgctggaaacgggaatatcttcctataaaatgctagacagaagcattctcagaaactgctctgtgatgtctgcattcaagtcacagagttgaacattgcctttcatagagcaggtttgaaacgctctttttgtagtatatggaagtggatgtttcggacggttggaggcccatggtgataaagggattatcttcccctacaagctagaaagaagcattctgtgaaacttgtttgtgatgtgtgtactcaactaacagagttgaacctttctttttacagagcagttttgaaacactctttttgtagaatctgcgaggggatatttggatacatttcagcatttcgttggaaacgggaatatattcatataaaatctcgacagaagctttctcagaaacttctttgtgatatgtgcattcaattcacagagttgaatattccctttcacagagtaggtttgaaacactctttttgtagtatctggaagtggacatttggagcgccttgacacctacggtgaaaagggaaatatcttcccataaaaactagacagaagcaatctcagaatcttctttgggatatatgcacgcagctaacagagttgaacctttctattgacagagcagttttgaaacagtctttctgtggaatctgcaagtggatatttggatagcttggaggatttcgttggaaacggaattacgtataaaaagtagacagcagcatcctcagaaacttctttgtgatgtgagcattcaagtcacagagttgaacattccctttcgtacagcagttttgaaacactctttctgtagtatctggaagtcaacgttaggacagctttcagctctatggtgagaaaggaaatatcttcaaataaaaactagacagaaacattctcataaacttgtttgtgatgtgtgaactcagctaagagacgtggatctttcttttgatagagcagttctgaaaaacacgttttgttgaatctgcaagtggacatttggatagatttgaagatttcgttggaaacgggaatatcttcatatcaaatctagacagaagcattctcagaaacgtctttgtgatgtttgcattcaactcatagagttgaacattccgtttcagagagcagctttgaagcactctttttgtagtatgtgcaagtggatatttggagcgctctgagtcctacggggaaaaagcaaatatcttcccataaccactagactgaaacattctcagaaactcctttatgacgtatgcactcacctaacagaaacgaaccttccttttgacagagcagttttgatacactctttttgtagaatctgcaagtggatatttggatagctgtgaagatttcattggaaacgggaatatcttcctataaaatctagacagaagcattctcagaaactgctctgtgatgtctgcattcaagtcacagagttgaacattgcctttcatagagcaggtttgaaatgctctttttgtagtatatggaagtggacgtttcagacggtttgaggcccatggtgataaagggaatatcttcccctgcaagctagaaagaaagcattgtgtgaaacttgtttgtgatgtgtgtactcaactaacagagttgaacctttcttttcacagagcagttttgaaacactctttttgtagaatctgcgaggggatacttggatagatttcaggatttcgttggaaacgggaatatcttcatataaaatctcgacagaagcattctcagaaacttctttgtgatatgtgcattcaagtcacagagttgaatattccctttcacagagtaggtttgaaacactctttttgtagtatctggaagtggacatttggagcgccttgacacctacggtgaaaagggaagtatcttcccatcaaaactagacagaagcaatctcagaatcttccttgggatatatgcacgcaactaacagagttgaacctttctattgacagagcagttttgaaacagtctttctgtggaatctgcaagtggatatttggatagcttggaggatttccttggaaacgggattacgtataaaaagtagacagcagcatcctcagaaactactttgtgatgtgtgcattcaagtcacagagttgaacattccctttcgtacagcagttttgaaacactctttctgtagtatctggaagtgaacattaggacagctttcaggtctatagtgagaaaggatatatcttcaaataaaaactagacagaagcattctcataaacttgtttgtgatgtgtgaactcagctaacagaggtggatctttcttttgatagagcagttctcaaaaacactttttgttgaatctgcaagtggacatttggatagatttgaagatttcgttggaaacgggaatatcttcatatcaaatctagacagaagcattctcagaaacgtctttgtgatgtttgcattcaactcatagagttgaacattccctttcagagagcagctttgaaacactctttttgtagtatgtgcaagtggatatttggagcgctctgaggcctacggtgaaaaagaaaatatcttcccataaccactagacagaaacattctcagaaactcctttatgacggtatgcactcacctaacagagaagaaccttccttttgacagagcagttttgatacactctttttgtagaatctgcaagtggatatttggatagctgtgaagattttgttggaaacgggaatatcttcctataaaatctagacagaagcattctcagaaactgctctgtgatgtctgcattcaagtcacagggttgaacattgcctttcctagagcaggtttgaaacgctctttttgtagtatatggaagtggacgtttcggacggtttgaggcccatggtgataaagggaatatcttcccctacaagctagaaagaagcattctgtgaaacttgtttgtgatgtgtgtactcaactaacagagttgaacctttctttttacagagcagttttgaaacactctttttgtagaatctgcgaggggatatttggatagatttcaggatttctttggaaacgggaatatcttcatataaaatctcgacaaaagcattctcagaagcttctttgtgatatgtgcattcaagtcacagagttcaatattccctttcacagagtaggtttgaaacactctttttgtagtatctggaagtggacatttggagcgccttgacgcctacagtgaaaagggaaatatcttctcataaaaagtagacagaagcaatctcagaattttctttgggatatatgcacacagcgaactgagttgaacttttctattgacatagcagttttgaaacagtctttctgtggaatctgcaagtggatatttggatagcttggaggatttcgttggaaatgggattacgtataaaaagtagacagcagcatcctcagaaacatccttgtgatgtgtgcattcaagtcacagagttgaacattccctttcgaacagcagttttgaaacactctttctgtagtatctggaagtgaactttaggagagctttcaggtctatagtgagaaaggatatatcttcaaataaaaactagacagaagcattctcataaacttgtttgtgaagtgtgaactcagctaacagaggtggatctttcttttgatagagcagttctgaaaaacactttttgttgaatctgcaagtggacatttggatagatttgaagatttcgttggaaacgggaatatcttcatatcaaatctagacagaagcattctcggaaacgtctttgtgatgtttgcattcaactcatagagttgaacattccgtttcagagagcagctttgaagcactctttttgtagtatgtgcaagtggatatttggagcgctgtgaggcctgcagtgaaaaagcaaatatcttcccataaccactagactgaaacattctcagaaactcctttatgacgtatgtactcaactaacagagaagaaccttccttttgacagagcagttttgatacactctttttgtagaatctgcaagtggatatttggatagctgtgaagatttcattggaaacgggaatatcttcctataaaatctagacagaagcattctcagaaactgctctgtgatgtctgcattcaagtcacagagttgaacattgcctttcatagagcaggtttgaaacgctctttttgtagtatatggaagtagacgtttcggacggtttgaggcccatggtgataaagggaatatcttcccctacaagctagaaagaagcattctgtgaaacttgtttgtgatgtgtgtacacaactaacagagttgaacctttctttttacagagcagttttgaaacactctttttgtagaatctgcgaggggatatttagatagatttcaggatttcgttggaaacgggaatatcttcatataaaatctcgacagaagcattctcagaaacttctttgtgatatctgcattcaagtcacagagttgaatattccctttcacagagtaggtttgaaacactctttttgtagtatctggaagtggacatttggagcgccttgacgcctacggtgaaaagggaaatatcttcccataaaaactggacagaagcaatctcagaatcttctttgggatatatgcacacagctaacagagttgaacctttctattgacagagcagttttgaaacagtctttctgtggaatctgcaagtggatatttggatagcttggaggatttcgttggaaacgggattacgtataaaaagtagacagcagcatcctcagaaacttctttgtgatgtgtgcattcaagtcacagagttgaacattccctttcgtacagcagttttgaaacactctttctgtagtatctggaaatgaacattaggacagctttcagctctatggtgagaaaggaaatatcttcaaataaaaactagacagaagcattctcataaacttgttcgtgatgtgtgaactcagctaagagccgtggatctttcttttgatagagcagttctgaaaaacactttttgttgaatctgcaagtggacatttggatagatttgaagatttcgttggaaacgggaatatcttcatatcaagtccagacagaagcattctcagaaacgtctttgtgatgttggcattcaactcatagagttgaacattccgtttcagagagcagctttgaggcactctttttgtagtatgtgcaagtggatatttggagcgctctgaggcctacggtgaaaaagcaaatatcttcccataaccactagacagaaacattctcagaaactccgttatgacgtatgcactcacctaacagagaagaaccttccttttgactgagcagttttgatacactctttttgcagaatctgcaagtggatatttggataactgtgaagatttcgttggaaacgggaatatcttcctataaaatctagacagaagcattctcagaaactgctctgtgatgtctgcattcaagtcacagagttgaacattgcctttcatggagcaggtttgaaacgctctttttgtagtatatggaagtggacgattcggacggtttgaggcccatggtgataaagggaatatcttcccctacgagctagaaagaagcattctgtgaaacttgtttgtgatgtgtgcactcaactaacagagttgaacctttctctttacagagcagttttgaaacactctttttgtagaatctgcgaggggatatttggatacatttcaggatttcgctggaaacgggaatatcttcatataaaatctcgacagaagcattctcagaaacttctttgtgatatctgcattcaagtcacagagttgaatattccctttcacagagtaggtttgaaacactctttttgtagtatctggaagtggacatttggagcgccttgacgtctacggtgaaaacggaaatatcttcccataaaaactagacagaagcaatctcagaatcttctttgggatatatgcacgcagctaatagagttgaacctttctattgacagagcagttttgaaacagtctttctgtggaatctgcaagtggatatttggatagcttgggggatttctttggaaacgggattacgtataaaaagtagacagcagcatcctcagaatcttccttgtgacgtgtgcattcaagtcacagagttgaacattccctttcgtacagcagttttgaaaaactctttctgtagtatcgggaagtgaactttaggagagctttcaggtctatagtgagaaaggatatatcttcaaataaaaactagacagattcttttgatagagcatcagctaacagacgtggatctttcttttgatacagcagttttgaaaaacactttttgttgaatctgcaagtggacatttggatagatatgaagatttcgttggaaacgggaatatcttcatatcaaatctagacagaagcattctcagaaacgtctttgtgatgtttgcattcaactcatagagttgaacattccctttcaaagagcagctttgaagcactctttttgtagtatgtgcaaggggatatttggagctctctgaggcctaaggtgaaaaagcaaatatcttcccataaccactagacagaaacattctcagaaactcctttatgacgtatgtactcaactaacagagaagaaccttccttttgacagagcagttttgatacactctttttgtagaatctgcaagtggatatttggatagctgtgaagatttctttggaaacgggaatatcttcctataaaatctagacagaagcattctcagaaactgctctgtgatgtctgcattcaagtcacagagttgaacattgcctttcatagagcaggtttgaaacgctctttttgtagtatatggaagtggtcttttcggacggtttgaggcccatggtgataaagggaatatcttcccctacaagctagaaagaagcattctgtgaaacttgtttgtgatgtgtgtactcaactaacagagttgaaccttcctttttacagagcagttttgaaacactctttttgtagaatctgcgaggggatatttggatagatttcaggatttctttggaaacgggaatatcttcatataaaatctcgacagaagcattctcagaaacttctttgtgatatgtgcattcaagtcacagtagttgaatattccctttcacagagtaggtttgaaacactctttttgtagtatctggaagtggacatttgaagcgccttgacgcctacggtgaaaagggaaatatcttcccataaaaactagacagaagcaatctcagaatcttctttgggatatatgcacgcagctaacagagttgaacctttctattgacagagcagttttgaaacattctttctgtggaatctgcaagtggatatttggatagcttgcaggatttcgttggaaacgggattacgtataaaaagtagacagcagcatcctcagaaacttctttgtgatgtgtgcattcaagtcacagagttgaacattccctttcgtacagcagttttgaaacactctttctgtagtatctggaagtgaacattaggacagctttcaggtctatggtgagaaaggaaatatcttcaaataaaaactagacagcagcattctcataaacttgtttgtgatgtgtgaactcagctaacaggaggtggatctttcttttgatagagcagttctgaaaaacactttttgttgaatctgcaagtggacatttggatagatttgaatatttcgttggtaacgggaatatcttcatatcaaatctagacagaagcattctcagaaacgtctttgtgatgtttgcattcaactcatagagttgaacattccctttcagagagcagctttgtggcactctttttgtagtatgtgcaagtagatatttggagcgctctgaggcctacggtgaaaaagcaaatatcttcccataaccactagacagaaaacattctcagaaactcctttatgaggtatgcactcacctaacagagaagaaccttccttttgacagagcagttttgatacactctttttgtagaatctgcaagtggatatttggatacctgtgaagatttcgttggaaacgggaatatcttcctataaaatctagacagaagcattctcagaaactgctctgtgatgtctgcattcaagtcacagagttgaacattgcctttcatagagtatgtttgaaacgctctttttgtagtatatggaagtagacgtttcggacggtttgaggcccatggtgataaagggaatatcttcccctacaagctagaaagaagcattgtgtgaaacttgtttgtgatgtgtgtactcaactaacagagttgaacctttctttttacagagcagttttgaaacactctttttgtagaatctgcgaggggatatttggatacatttcaggatttccttggaaacgggaatatcttcatataaaatctcgacagaagcattctcagaaacttctttgtgttatctgcattcaagtcacagagttgaatattccctttcacagagtaggtttgaaacactctttttgtagtgtctggaagtggacatttggagcacattgacacctacggtgaaaagggaaatatcttcccataaaaactagacagaagcaatctcagaatcttctttgggttatatgcacgcagctaacagagttgaacctttctattgacagagcagttttgaaacagtctttctgtggaatctgcaagtggatatttggatagcttggaggatttcgttggaaacgggattacgtataaaaagtagacagcagcatcctcagaaacttctttgtgatgtgtgcattcaagtcacagagttgaacattccctttcgtacagcagttttcaaacactctttctgtagtaactggaagtgaacattaggacagctttcagctctatggtgagaaaggaaatatcttcaaataaaaactagacagaagcattctcataaacttgtttgtgatgtctgaactcagctaacagaggtggatctttcttttgatagagcagttctgaaaaacactttttgttgaatctgcaagtggacatttggatagatttgaagatttcattggaaacgggaatatcttcatatcaaatctagacagaagcattctcagaaacgtctttgtgatgtttgcattcaactcatagagttgaacattccctttcagagagcagctttgaagcactctttttgtagcatgtgcaagtggacatttggagcgccctgaggcctacggggaaaaaggaaatatcttcccataaccactagacagaaacattctcagaaactcctttatgacgtatgcactcacctaacagagaagaaccttcttttgacagaggagttttgatacactctttttgtagaatctgcaagtggatatttggatagctgtgaagatttcgttggaaacgggaatatcttcctataaaatctagacagaagcattctcagaaacagctctgtgatgtctgcattcaagtcacagagttgaacattgcctttcatagagcaggtttgaaacgctctttttgtagtatatggaggtggacgtttcggacggtttgagacccatggtgataaagggaatatattcccctacaagctagaaagaagcactctgtgaaacttgtttgtgatgtgtgtactcaactaacagtgttgaacctttctttttacagagcagttttgaaacactctttttgtagaatctgcgaggggatatttggatagatttcaggatttcgttggaaacgggaatatcttcatataaaatctcgacagaagcattctcagaaacttccttgtgatatgtgcattcaagtcacagagttgaatattccctttcacagagtaggtttgaaacactctttttgtagtatctggaagtggacatttagagcgccttgacgcctacggtgaaaagggaaatatcttcccataaaaactagacagaagcaatctcagaatcttctttgggatatatgcacgcagctaacagagttgaacctttctattgacagagcagttttgaaacagtctttctgtggaatctgcaagtggatatttggatagattggaggatttctttggaaacgggattaggtataaaaagtagacagcagcatcctcagaaacttctctgtgatgtgtgcattcaagtcacagagttgaacattccctttcgtacagcagttttgaaacactctttctgtagtatctggaagtgaacattaggacagctttcagctctatggtgagaaaggaaatatcttcaaataaaaactagacagaagcattctgataaacttgtttgtgaagtgtgaactcagctaacagaggtggatctttcttttgatagagcagttctgaaaaacactttttgttgaatctgcaagtggacatttggatagatttgaagatttcgttggaaacgggaatatcttcatatcaaatctagacagaagcattctcggaaacgtcttggtcatgtttgcattcaactcatagagttgaacattccctttcagagagcagctttgaagcactctttttgtagtatgtgcaaggggatatttggagcgctctgaggcctaaggtgaaaaagcaaatatcttcccataaccactaaacagaaacattctcagaaactcctttatgacgtatgcactcacctaacagaaaagaaccttccttttgacagagcagttttgatacactctttttgtagaacctgcaagtggatatttggatagctgtgaagatttcgttggaaacgggaatatcttcctataaaatctagacagaagcattctcagaaactgctctgtgatgtctgcattcaactcacagagttgaacattgcctttcatagagcaggtttgaaacgctctttttgtagtatatggaagtggacgtttcagacggtttgaggcccatggtgataaagggaatatcttcccctacaagctagaaagaagcattctgtgaaacttgtttgtgatgtgtgtactcaactaacagagttgaacctttctttttccagagcagttttgaaacactctttttgtagaatctgcgaggggatatttggatacatttcaggatttcgttggaaacgggaatatcttcatataaaatctcgacagaagcattctcagaaaacttctttgtgatatgtgcattcaagtcagagagttgaatattccctttcacagagtaggtttgaaacactctttctgtagtatctggaagtggacattttgagcaccttgacgcctacggtgaaaagggaaatatcttctcataaaaagtagacagaaagcaatctcagaatcttctttgggatatatgcacgcagctaacagagttgaacatttctattgacagagcagttttgaaacagtcgttctgtggaatctgcaagtggatatttcgatagcttggaggatttcgttggaaacgggattacgtatcaaaagtacacagcagcatcctcagaaactactttgtgatgtgtgcattcaagtcacagagttgaacattccctttcgtacagcagttttgaaacactctttctgtagtatctggaagtgaacattaggacagcttgcaggtctatggtgagaagggaaatatcttcaaataaaaactagacagaagcattctcataaacttgtttgtgatgtgtgaactcagctaacagacgtgaatctttcttttgatacagcagttttaaaaacactttttgttgaatctgcaagtggacatttggatagatttgaagatttcgttggaaacgggaatatcttcatatcaaatctagacagaagcattctcagaaacgtttttgtgatgtttgcattcaactcatagagttgaacattccctttcagagagcagctttgaagcactctttttgtagcatgtgcaagtggacatttggagcgccctgaggcctacggggaaaaagcaaatatcttcccataaccactagacagaaacattctcagaaactcctttatgacgtatgcactcacctaacagagaagaaccttccttttgacagagcagttttgatacactctttttgtagaatctgcaagtggatatttggatagctgtaaagatttcgttggaaacgggaatatcttcctataaaatctagacagaagcattctcagaaactgctctgtgatgtctgcattcaagtgacagagttgaacattgcctttcatagagcaggtttcaaacactctttttttagtatatggaagtggacgtttcggacggtttgagaaccatggtgataaaggaaatatcttcccctacaagctagaaagaagcattgtgtgaaacttgtttgtgatgtgtgtactcaactaacagagttgaacctttctttttacagagcagttttgaaacactctttttgtataatctgcgaggggatatttggatacatttcaggatttcgttggaaacgggaatatcttcatataaaatctcgacagaagcattctcagaagcttctttgtgatatgtgcattcaagtcacacagttgaatattccctttcacagagtaggtttgaaacactctttttgtagtatctggaagtggacatttggagcgccttgacgcctacggtgaaaagggaaatatcttctcataaaaagtagacagaagcaatctcagaatcttctttgggatgtatgcacgcagctaacagagttgaacctttctattgacagagcagttttgaaacagtctttttgtggaatctgcaagtggatatttggatagcttggaggatttcgttggaaacgggattacgtataaaaagtagacagcagcatcctcagaaacttctttgtgatgtgtgcattgaagtcacagagttgaacattccctttcgtacagcagttttgaaacactctttctgtagtatctggaagtgaacattaggacagctttcaggtctatggtgagaaaggaaatatcttcaaataaaaactagacagaagcattctcataaacttgtttgtgatgtgtgaactcagctaagagacctggatctttcttttgatagagcagttctgaaaaacactttttgttgaatctgcaagtggacatttggatagatttgaagatttctttggaaacgggaatatcttcatatcaaatctagacagaagcattctcagaaacgtctttgtgatgtttgcattcaacccatagagttgaacattccgtttcagagagcagctttgaagcactctttttgtagtatgtgcaaggggatatttggagcgctctgaggcctaaggtgaaaaagcaaatatcttcccataaccactagacagaaacattctcagaaactcctttatgacgtatgtactcaactaacagagaagaaccttccttttgacagagcagttttgatacactctttttgtagaatctgcaagtggatatttggatagctgtgaagatatcgttggaaacgggaatatcttcctataaaatctagacagaagcattctcagaaactgctctgtgatgtctgcattcaagtcacagagttgaacattgcttttcatagagcaggtttgaaacgttctttttgtagtatatggaagtagacgtttcggacgctttgaggcccatggtgataaagggaatatcttcccctacaagctagaaagaagcattctgtgaaacttgtttgtgatgtgtgtactcaactaacagagttgaacctttctttttacagagcagttttgaaacactctttttgtagaatctgcgaggggatatttggatagatttaggatttcgttggaaacgggaatatcttcatataaaatctcgacagaagcattctcagaaacttctttgtgatatctgcctttaagtcacagagttgaatattccctttcacagagtaggtttgaaacactctttttgtagtatctggaagtggacatttggagcgcattgacgcctacggtgaaaagggaaatatcttcccataaaaactagacagaagcaatctcagaattttctttgggatatatgcacacagctaacagagttgaacttttctattgacatagcagttttgaaacagtctttctgtggaatctgcaagtggatatttggatagcttggaggatttcgttggaaatgggattacgtataaaaagtagacagcagcatcctcagaaacttctttgtgatgtgtgcattcaagtcacagagttgaacattccctttcgtacagcagttttgaaacactctttctgtagtgtctggaagtgaacattaggacagctttcaggtctatggtgagaaaggaaatatcttcaaataaaaactagacagaagcattctcataaacttgtttgtgatgtgtgaactcagctaagagacgtggatctttcttttgatagagcagttctgaaaaacacgttttgttgaatctgcaagtggacatttggatagatttgaagatttcgttggaaacgggaatatcgtcatatcaaatctagacagaagcattctcggaaacgtctttgtcatgtttgcattcaactcatagagttgaacattccgtttcagagagcagctttgaagcactctttttgtagtatgtgcaagtggatatttggatcgctctgaggcctaaggtgaaaaagcaaatatcttcccataaccactagacagaaacattctcagaaactcctttatgacgtatgcactcacccaacagagaagaaccttccttttgacagagcagttttgatacactctttttgtagaatctgcaagtggatatttggatagctgtgaagatttcgttggaaacgggaatatcttcctataaaatctagacagaagcattctcagaaactgctctgtgatatctgtattcaagtcacagagttgaacattgcctttcatagagcaggtttgaaacgctctttttgtagtatatgtaagtggatgtttcggacggttggaggcccatggtgataaagggaatatcttcccctacaagctagaaagaagcattctgtgaaacttgtttgtgatgtgtgtactcaactaacagagttgaacctttctttttacagagcagttttgaaacactctttttgtagaatctgcggggggatatttggatagatttcaggatttcgttggaaacgggaatatcttcatataaaatctcgacagaagcattctcagaaacttctttgtgatatctgcattcaggtcacagagttgaatattccctttcaccgagtaggtttgaaacattctttttgtagtatctggaagtggacatttggagcgccatgacgcctacggtgaaaagggaaatatcttcccataaaaactagacagaaagcaatctcagaatcttctttgggatatatgcacgcagctaacagagttgaacctttctattgacagagcagttttgaaacagcctttctgtggaatctgcaagtggatatttggatagcttggaggatttcgttggaaacgggattacgtataaaaagtagacagcagcatcctcagaaacttctttgtgacgtgtgcattcaagtcacagagttgaacattccctttcgtacagcagttttgaaacactctttctgtagtatctggaagtgaacattaggacagctttcagctctatggtgagaaaggaaatatcttcaaataaaaactagacagaagcattctcattaacttgtttgtgatgtgtgaactcagctaacagaggtggatctttcttttgatagagcagttctgaaaaacattttttgttgaatctgcaagtggacatttagatagatttgaagatttcgttggaaacgggaatatcttcatatcaaatctagacagaagccttctcagagacgtctttgtgatgtttgcattcaactcatagagttgaacattccgtttcagagagcagctttgaggcactctttttgtagtatgtgcaagtggatatttggagcgctctgaggcctacggtgaaaaagcaaatatcttcccataaccactagacagaaacattctcagaaactcctttacgacgtatgcactcacctaacagagaagaaccttccttttgacagagcagttttgatacactctttttgtagaatctgcaagtggatatttggatagctgtgaagatttcgttggaaacgggaatatcttcctataaaatctagacagaagcattttcagaaactgctctgtgatgtctgcattcaagtcacagagttgaacattgcctttcatagagcaggtttgaaacgctctttttgtagtatatggaagtggatgtttcggacggttggaggcccatggtgataaagggaatatcttcccctacaagctagaaagaagcattctgtgaaacttgtttgtgatatgtgcactcaactaacagagttgaacctttctttttacagagcagttttgaaacactctttctgtagaatctgcgaggggatatttggatagatttcaggatttcgttggaaacgggaatatcttcatataaaatctcgacagaagcattctccgaaacctctttgtgatatatgcattgaagttacagagttgaatattccctttcacatagcaggtttgaaacactctttttgtagtatctggaagtggacattgggagcgctttgacgccaatggtgaaaaaggaaatatcttcccataaaaactacacagaagcaatctcagaatcttctttgggatatatgcacgcagttaacagagttgaacctttctattgacagagcagttttgaaacagtctttctgtggaatctgcaagtggatatttggatagcttggaggatttcgttggaaacgggattacgtataaaaagtagacagcagcatcctcagaaacttctttgtgatgtgtgcattcaagtcacagagttgaacattccccttcgtacagcagttttgaaacactctttgtgtattatctgggagtgaacattaggacagctttcaggtctatggtgagaaaggaaatatcttcaaataaaaactagacagaagcattctcataaacttgtttgtgatgtgtgaactcagctaacagacgtggatctttcttttgatacagcagttttgaaaaacactttttgttgaatctgcaagtggacatttggatagatatgaagatttcgttggaaacgggaatatcttcatatcaaatctagacagaagcattctcagaaacgtctttgtgatgtttgcattcaactcatagagttgaacattccgtttccaagagcagctttgaggcactctttttgtagtatgtgcaagtggatatttggagcgctctgaggcctacggtgaaaaagcaaatatcttcccataaccactagacagaaacattctcagaaactcctttatgacgtatgtactcaactaacagagaagaaccttccttttgacagagcaggtttgatacactctttttgtagaatctgcaagtggatatttggatagctgtgaagatttcgttggaaacgggaatatcttcctataaaatccagacagaagcattctcagaaactgctctgtgatgtctgcattcaagtcacagagttgaacattgcctttcctagagcaggtttgaaacgatctttttgtagtatatggaagtggacgtttcggacggtttgaggcccatggtgataaagggaatatcttcccctacaagctagaaagaagcattctgtgaaacttgtttgtgatgtgtgtactcaactaacagagttgaacctttctttttacagagcagtttggaaacactctttttgtagaatctgcgaggggatatttggatagatttcaggatttcgttggaaacgggaatatcttcatataaaatctcgacagaagcattctcagaaacttctttgtgatatctgcattcaagtcacagagttgaatattccctttcacagagtaggtttgaaacactctttttgtagtatctggaagtggacatttggagcgccttgacgcctacggtgaaaagggaaatatcttcccataaaaactagacagaagcaatctcaggaatcttctttgggatatatgcacgcagctaacagagttgaacctttctattgacagagcagttttgaaacagtctttctgtggaatctgcaagtggatatttggatagcttggaggatttcgttggaaacgggattaagtataaaaagtagacagcagcatcctcagaaacttctttgtgcggtgtgcattcaagtcacagagttgaacattccctttcgtacagcagttttgaaacactctttctgtagtatctggaagtgaacattaggacagctttcaggtctatggtgagaaaggaaatatcttcaaataaaaactagacagaagcattctcataaacttgtttgtgatgtgtgaactcagctaacagaggtggatctttcttttgatagagcagttctgaaaaacactttttgttgattatgcaagtggacatttggatagatttgaagatttcgttggaaacgggaatatcttcatatcaaatgtagacagaagcattctcagaaacgtctttgtgatgtttgcattcaactcacagagttgaacattccgtttcagagagcagctttgaagcactctttttgtagtatgtgcaagtggatatttggagcgctctgaggcctacggtgaaaaagcaaatatcttcccataaccactagacagaaacattctcagaaactcctttatgacgtatgcactcacctaacagagaagaaccttccttttgacagagcagttttgatacactctttttgtagaatctgcaagtggatatttggatagctgtgaagatttcgttggaaacgagaatatcttcctataaaatctagacagaagcattctcagaaactgctctgtgatgtctgcattcaagtcacagagttgaacattgcttttcatagagcaggtttgaaacgctctttttgtagtatatggaagtagacgtttcggacggtttgaggcccatggtgataaagggaatatcttcccctacaagctagaaagaagcattctgtgaaacttgtttgtgatgtgtgtactcaactaacagagttgaacctttctttttacagagcagttttgaaacactctttttgtagaatctgcgaggggatattttgatacatttcagcatttcgttggaaacgggaatatcttcatataaaatctcgacagaagcattctcagaaacttccttgtgatatgtgcattcaagtcacagagttgaatattccctttcacagagtaggtttgaaacactctttttgtagtatctggaagtggtcatttggagcgccttgacgcctacggtgaaaagggaaatatcttcccataaaaactagacagaagcaatctcagaatcttctttgtgatatatgcacgcagctaacagagttgaacctttctattgactgagcagatttgaaacagtctttctgtggaatctgcaagtggatatttggatagattggaggatttcgttggaaacggaattacgtataaaaagtagacagcagcatcctcagaaacttctttgtgatgtgtgcattcaagtcacagagctgaacattccctttcgtacagcagttttgaaacactctttctgtagtatctggaagtgaacattaggacagctttcaggtctatggtgagaaaggaaatatcttcaaataaaaactagacagaaacattctcataaacttgtttgtgatgtgtgaactgagctaacagaggtggatctttcttttgatagagcagttcggaaaaacactttttgttgaatctgcaagtggacatttggatagatttgaagatttcgttggaaacgggaatatcttcatatcaaatctagacagaagcattctcagaaacgtctttgtgatgtttgcattcaactcatagagttgaacattccctttcagagagcagctttgaagcactctttttgtagcatgtgcaagtggacatttggagcgctctgaggcctacggtgaaaaagcaaatatcttcccataaccactagacagaaacattctcagaaactcctttatgaagtatgcactcacctaacagagaagaaccttccttttgacagagcagttttgataaactctttttgtagaatctgcaagtggatatttggatagctgtgaagatttcgttggaaacgggaatatcttcctataaaatctagacagaagcattctcagaaactgctctgcgatgtctgcattcaagtcacagagttgaacattgcttttcatagagcaggtttgaagcgctctttttgtagtatatggaagtagacgtttcggacggtttgaggcccatggtgataaagggaatatcttcccctacaagctagaaagaagcattctgagaaacttgtttgtgatgtgtgtactcaactaagagaagtgaacctttctttttacagagcagttttgaaacactctttttctagaatctgcgaggggatatttggatagatttcagaatttcgttgtaaacgggaatatcttcatataaaatctcgacagaagcattctcaggaaacttctttgtgatatctgcattcaagtcacagagttgaatattccctttcacagagtaggtttgaaacactctttttgtagtatctggaagtggacatttggagcaccttgacacctacggtgaaaagggaaatatcttcccataaaaactagacagaagcaatctcagaatcttctttgggatatatgcacgcagctaacagagttgaacctttctattgacagagcagttttgaaacactctttctgtggaatctgcaagtggatatttggatagcttggaggatttcgttggaaacgggattacgtataaaaagtagacagcagcatcctcagaaacttctttgtgatgtgtgcattcaagtcacagagttgaacattccctttcgtacagcagttttgaaacactctttctgtagtatctggaagtgaacattaggacagctttcaggtcgatggtgagaaaggaaatatcttcaaataaaaactagatagaagcattctcataaacttgtttgtgatgtgtgaacgcagctaacacacgtggatctttcttttgatagagcagttctgaaaaacactttttgttgaatctgcaagtggacatttggatagatttgaagatttcgttggaaacgggaatatcttcatatcaaatctagacagaaagcattctcagaaacgtctttgcgatgtttgcattcaactcatagagttgaacattccgtttcagagagcagctttgaggcactctttttgtagtatgtgcaagtggatatttggagcgctctgaggcctacggtgaaaaagcaaatatcttcccataaccactagacagaaacattctcagaaactcctttatgacgtatgcactcacctaacagagaagaaccttccttttgacagagcagttttgatacactctttttgtagaatctgcaagtggatatttggatagctgtgaagatttcgttggaaacggaaatatcttcctataaaatctagacagaaagcattctcagaaactgctctgtgatgtctgcattcaagtcacagagttgaacattgcctttcatagagcaggtttgaaacgctctttttgtagtatatggaagtagacgtttcggacggtttgaggcccatggtgataaagggaatatcttcccctacaagctagaaagaagcattctgtgaaacttgtttgtgatgtgtgtactcaagtaacagagttcaacctttctttttacagagcagttttgaaacactctttttgtagaatctgcgaggggatatttggatagatttcaggatttcgttggaaacgggaatatcttcatataaaatctcgacagaagcattctcagaaacttctttgtgatatctgcattcaagtcacagagttgaatattccctttcacagagtaggtttgaaacactctttttgtagtgtctggaagtggacatttggagcacattgacaactacggtgaaaagggaaatatcttcccataaaaactagacagaagcaatctcagaatcttctttgggatatatgcacgcagctaagagagttgaacctttctattgacagagcagttttgtaacagtctttctgtggaatctgcaagtggatatttggatagcttggaggatttcgttggaaacgggattacctataaaaagtagacagcagcatcctcagaaacttctttgtgatgtgtgcattcaagtcacagagttgaacattccctttcgtacagcagttttgaaaaactctttctgtagtgtctggaagtgaacattaggacagcattcaggtctatggtgagaaaggaaatatcttcaaataaaaactacacagaagcattctcataaacttgtttgtgatgtgtgaactcagctaagagacgtggatctttcttttgatagagcagttctgaaaaacactttttgttgaatctgcaagtggacatttggatagatttgaagatttctttggaaatgggaatatcttcatatcaaatctagagagaagcattctcagaaacgtctttgtcatgtttgcattcaactcatagagttgaacattccctttcagagagcagctttgaaacactctttttgtagtatgtgcaagtggatatttggagcgctctgaggcctacggtgaaaaagaaaatatcttcccataaccactagacagaaactttctcagaaactcctttatgacgtatgtactcaactaacagagaagaaccttccttttgagagagcagttttgatacactctttttgtagaaactgcaagtggatatttggatagctgtgaagatttcgttggaaacgggaatatcttcctataaaatctagacagaagcattctcagaaactgctctgtgatgtctgcattcaagtcacagagttgaacattgcctttcatagagcaggtttgaaatgctcttttcgtagtatatggaagtggacttttcggacggtttgaggcccatggtgataaagggaatatcttcccctacaagctagaaagaagcattctgtgaaacttttttgtgatgtgtgtactcaactaacagagttgaacctttctttttacagagcagttttgaaacactctttttgtagaatctgcgaggggatatttggatagatttcaggatttcgttcgaaacgggaatatcttcatataaaatctcgacagaagcattctcagaagcttctttgtgatatgtgcattcaagtcacagagttgaatattcccgttcacagagtaggtttgaaacactctttttgtagtatctggaagtggacatttggagcgccctgacgcctacggtgaaaaggaaaatatcttctcataaaaagtagacagataagcaatctcagaatcttctttgggatatatgcacgcagctaacagagttgaacctttctattgacagagcagttttgaaacagtctttctgtggaatctgcaagtggatatttggatagcttggaggatttcgttggaaacgggattacgtataaaaagtagacagcagcatcctgagaaacttccttgtgatgtgtgcattcaagtcacagagttgaacattccctttcgtacagcagttttgaaacactctttctgtagtatctggaagtgaacattaggacagcgtttcaggtctatggtgagaaaggaaatatcttcaaataaaaactagacagaagcattctcataaacttgttcgtgatgtgtgaactcagctaagagccgtggatctttcttttgatagagcagttctgaaaaacactttttgttgaatctgcaagtggacatttggatagatttgaagatttctttggaatcgggaatatcttcatatcaaatctagacagaagcattctcagaaacgtctttgtgatgtttgcattcaactcatagagttaaacattccgtttcagagagcagctttgaagcactctttttgtagtatgtgcaagtggatatttggagcgctctgaggcctacggtgaaaaagcaaatatcttcccataaccactagacagaaacattctcagaaactcctttatgacgtatgcactcacctaacagagaagaaccttccttttgacagagcagttttgatacactctttttgtagaatctgcaagtggatatttggatacctgtgaagatttcgttggaaacgggaataacttcctataaaatctagacagaagcattctcagaaactgctctgtgatgtctgcattcaagtcacagagttgaacattgcctttcatagagcaggtttgaaacgctctttttgtagtatatggaagtggatgtttcggacggttggagccccatggtgataaagggaatatcttcccctacaagctagaaagaagcattctgtgaaacttgtttgtgatgtgtgtactcaactaacagagttgaacctttcttttcacagagcagttttgaaacactctttttgtagaatctgcgaggggatatttggatagatttcaggatttcgttggaaacgggaatatcttcatataaaatctcgacagaagcattctcagaaacttcattgtgatatgcgcattctagtcacagagttgaatattccctttcacagagtaggtttgaaacactctttttgtagtatctggaagtggacatttggagcgccttgacgcctacggtgaaaagggaaatatcttcccataaaaagtagacagaagcaatctcagaatcttctttgggatatatgcacgcagctaacagagttgaacctttctattgacagagcagttttgaaacagtctttctgtggaatctgcaagtggatatttggatagcttggaggatttcgttggaaacgggagtacgtataaaaagtagacagcagcatcctcagaaacttctttgtgaggtgtgcattcaagtcacagagttgaacattccctttcgtgcagcagttttgaaacactctttctgtagtatctggaagtgaacattaggacagctttcaggtctatggtgagaaaggaaatatcttcaaataaaaactagacagaagcattctcataaacttgtttgtgatgtctgaactcagctaacagaggtggatctttcttttgatagagcagttctgaaaaacactttctgttgaatctgcaagtggacatttggatagatttgaagatttcgttggaaacgggaagatcttcatatcaaatctagacagaagcattctcagaaacgtctttgtgatgtttgcattcaaatcatagagttgaacattccctttcagagagcagctttgaagcattctttttgtagtatgtgcaaggggatatatggagcgctctgaggcctaaggtgaaaaagcaaatatcttcccataaccactagacagaaacattctcagaaactcctttatgacgtatgcactcacctaacagagaagaaccttccttttgacagagcacttttgatacactctttttgtagaatctgaaagtggatatttggatagctgtgaagatttcgttggaaacgggaatatcttcctataaattctagacagaagcattctcagaaactgctctgtgatgtctgcattcaagtcacagagttgaacattgcctttcctagagcaggtttgaaacgctctttttgtagtatatggaagtggacgtttcggacggtttgaggcccacggtgataaagggaatatcttcccctacaagctagaaagaagcattctgtgaaacttgtttgtgatgtgtgtactcaagtaacagagttgaacctttctttttacagagcagttttgaaacactctttctgtagaatctgcgaggggatatttggatacatttcaggatttcgttggaaacgggaatatcttcatagaaaatctcgacagaagcattctcagaaacttctttgtgatatgtgcattaaagtcacagagttgaatattccctttcacagagtaggtttgaaacactctttttgtagtatctggaagtggacatttggagcgccttgacgccctacggtgaaaagggaaatatcttcccataaaaactagacagaagcaatctcagaatcttctttgggatatatgcacgcagctaacagagttgaacctttctattgacagagcagttttgaaacagtctttctgtggaatctgcaagtggatatttggatagcttggaggatttcgttggaaacgggattaagtataaaaagtagacagcagcatcctcagaaacttctttgtgatgtgtgcattcaagtcacagagttgagcattccctttcgtacagcagttttcaaacactctttctgtagtaactggaagtgaacattaggacagctttcaggtctatggtgagaaaggaaatatcttcaaataaaaactagacagaagcattctgataaacttgtttgtgaagtgtgaactcagctaacagaggtggatctttctttggtacagcagttttgaaaaacactttgttgaatctgcaaggggacatttggatagatttgaagattacgttggaaacgggaatatcttcatatcaaatctagacagaagcattctcggaaacgtctttgtgatgtttgcattcaactcatagagttgaacattccgtttcagagagcagctttgaggcactcattttgtagtatgtgcaagtggacatttggagcgctctgaggccttcggtgaaaaagcaaatatcttcccataaccactagacagaaacattctcacaaactcctttatgacgtatgtactcaactaacagagaagaaccttccttttgacagagcagttttgatacactctttttgtagaatctgcaagtggatatttggatagctgtgaagatttcgttggaaacgggaatatcttcctataaaatctagacagaagcattctcagaaactgctatgtgatgtctgcattcaagtcacagagttgaacattgcctttcctagagcaggtttgaaacgctctttttgtagtatatggaagtggaagtttcggacggtttgaggcccatggtgataaagggaatatcttcccctacaagctagaaagaagcattctgtgaaacttgtttgtgatgtgtgtactcaactaatagagttgaacctttctttttacagagcagttttgaaacactctttttgtagaatctgcgaggggatatttggatagatttcaggatttcgttggaaacgggaatatcttcatataaaatctcgacagaagcattctcagaagcttctttgtgatatgtgcattcaagtcacagagttcaatattccctttcacagagtaggtttgaaacactctttttgtagtatctggaagtggacatttggagagccttgacgcctacggtgaaaagggaaatatcttctcataaaaagtagacagaagcaatctcagaatcttctttgggatatatgcacgcagctaacagagttgaacctttctattgacagagcagttttgaaacagtctttctgtggaatctgcaagtggatatttggatagcttggaggatttcgttggaaacgggattacgtagaaaaagtagacagcagcatcctcagaaacttctttgtgatgtgtgcattcaagtcacagagttgaacattccctttcgtacagcagttttgaaacactctttctgtagtatctggaagtgatcattaggacagctttcaggtctatggtgagaaaggaaatatcttcaaataaaaactagacagaagcattctcataaacttgtttgtgatgtgtgaactcagctaacagaggtggatctttcttttgatagagaagttctgaaaaacactttttgttgaatctgcaagtggacatttggatagatttgaagatttcgttggaaacgggaatatcttcatatcaaatctagacagaagcattctcagaaacgtctttgtgatgtttgcattcaactcatagagttgaacattccgtttcagagagcagctttgaggcactctttttgtagtatgtgcaagtggatatttggagcgctctgaggcctacggtgaaaaagcaaatatcttcccataaccactagacagaaacattctcagaaactcctttatgacgtatgcactcacctaacagagaagaactttccttttgacagagcagttttgatacactctttttgtagaatctgcaagtggatatttggatagctgtgaagatttcgttggaaacgggaatatcttcctataaaatctagacagaagcattctcagaaactgctctgtgatgtctgcattcaagtcacagagttgaacattgcctttcatagagcaggtttgaaacgctctttttgtagtatataaaagtggacgtttcggacggtttgaggcccatggtcataaagggaatatcttaccctacaagctagaaagaagcattctgtgaaacttgtttgtgatgtgtgtactcaactaacagcagttgaacctttcttttcacagagcagttttgaaacactctttttgtagaatctgcgaggggaaatttggatagatttcaggatttcgttggaaacgggaatatcttcatacaaaatctcgacagaagcattctcagaaacttccttgtgatatgtgcattcgagtcacagagttgaatattccctttcacagagtaggtttgaaacactctttttgtagtatctggaagtggacatttggagcgcctggacgcctacggtgaaaagggaaatatcttcccataaaaactagacagaagcaatctcagaatcttctttgggatttatgcacgccgctaacagagatgaacctttctattgacagagcagttttgaaacagtctttctgtggaatctgcaagtggatatttggatagcttggaggatttcgttggaaacgggattacgtataaaaagtagacagcagcatcctcagaaacttctttgtgatgtgtgcattcaagtcacagagttgaacattccctttcgtacagcagttttgaaacactctttctgtagtatctggaagtgaacattaggacagctttcagctctatggtgagaaaggaaatatcttcaaataaaaactaaacagaagcattctcataaacttgtttgtgatgtgtgaactcagctaacacacgtggatctttcttttgatagagcagttctgaaaaacactttttgttgaatctgcaagtggacatttggatagatttgaagatgtcgttggaaacgggaatatcttcatatcaaatctagacggaagcattctcagaaacgtctttgtgatgtttgcattcaactcatagagttgaacattccgtttcagagagcagctttgaagcactctttttgtagtatgtgcaagcggatatttggagcgctctgaggcctacggtgaaaaagcaaatatcttcccataaccactagacagaaacattctcagaaactcctttatgacgtatgcactcacctaacagagaagaaccttccttttgacagagcagttttgaaacactctttttgtagaatctgcaagtggatatttggatacctgtgaagatttcgttggaaacgggaatatcttcctataaaatctagacagaagcattctcagaaactgctctgtgatgactgcattcaagtcacagagttgaacattgcctttcctagagcaggtttgaaacgctctttttgtagtatatggaagtggacgtttcggacggtttgaggcccatggtgataaagggaatatcttcccctacaagctagaaagaagcattctgtgaaacttgtttgtgatgtgtgtactcaactaacagagttgaacctatctttttacagagcagttttgaaacactctttttgtagaatctgcgaggggatatttggatagatttcaggatttcgttggaaacgggaatatcttcatataaaatctcgacagaagcattctcagaaacttctttgtgatatctgcattcaagtcacagagttgaatattccctttcacagagtaggtttgaaacactctttttgtagtatctggaagtggacatttggagcgccttgaccgctacggtgaaaagggaaatatcttcccataaaaactagacagaagcaatctcagaatcttctttgggatatatgcacgcagctaacagagttgaacctttctattgacagagcagttttgaaacagtctttctgtggaatctgcaagtggatatttggatagttggaggatttcattggaaacgggattacgtataaaaagtagacagcagcatcctcagaaacttctttgtgatgtgtgcattcaagtcacagagttgaacattccctttcgtacagcagttttgaaacactctttctgtagtatctggaagtgaacattaggacagctttcagctctatggtgagaaaggaaatatcttcaaatataaactagacagaagcattttcataaacttgtttgtgatgtgtgaactcagctaacagaggtggatcattcttttgatagagcatcagctaacagacgtggatctttcttttgatacagcagttttgaaaaacactttttgttgaatctgcaagtggacatttggatagatatgaagatttcgttggaaacgggaatatcttcatatcaaatctagacagaagcattctcagaaacgtctttgtgatgtttgcattcaactcatagagttgaacattcccttccagagagtagctttgaagcactctttttgtagcatgtgcaagtggacatttggagcgctctgaggcctacggggaaaaagcaaatatcttcccataaccactagacagaaacattctcagaaactcctttatgacgtatgcactcacctaacagaaaagaaccttccttttgacagagcagttttgatacactctttttgtagaatctgcaagtggatatttggatagctgcgaagatttcgttggaaacgggaatatcttcctataaaatctagacagaagcattctcagaaactgctctgtgatgtctgcattcaagtcacagagttgaacattgcctttcatagagcaggtttgaaacgctctttttgtagtatatggaagtggatgtttcggacggttggaggcccatggtgataaagggaatatctttccctacaagctagaaagaagcattctgtgaaacttgtttgtgatgtgtgtactcaactaacagagttgaacctttctttttacagagcagttttgaaacactctttttgtagaatctgcgaggggatatttggatagatttcaggatttcgttggaaacgggaatatcttcatataaaatctcgacggaagcattctcagaaacttctttgtgatatgtgcattcaagtcacagagttgaatattccctttcacagagtaggtttgaaacactctttttgtagtatctggaagtggacatttggagcgccttgacacctatggtgaaaagggaaatatcttcccataaaaactagacagaagcaatctcagaatcttctttgggatatatgcacgcagctaacagagttgaacctttctattgacagagcagtttagaaacagtccttctgtggaatctgcaagtggatatttggatagcttggaggatttctttggaaacgggattacgtataaaaagtagacagcagcatcctcagaaacttctttgtgatgtgtgcattcaagtcacagagttgaacattccctttcgtacagcagtattgaaacactctttctgtagtatctagaagtgaacattaggacagctttcaggtctatggtgagaaaggaaatatcttcaaataaaaactagacagaagcattctcataaacttgtttgtgatgtgtgaactcagctaacagaggtggatctttcttttgatagagcagttctgaaaaacactttttgttgagtctgcaagtggacatttggatagatttgaagatttcgttggaaacgggaatatcttcatatcaaatctagacagaagcattctcagaaacgtctttgtgatgtttgcattcaactcatagagttgaacattccctttcagagagcagctttgaagcactctttttgtagtatgtgcaagtggatattaggagcgctctgaggcctaaggtgaaaaagcaaatatcttcccataaccactagacagaaacattctcagaaactcctttatgacgtatgcactcacctaacagagaagaaccttccttttgacagagcagttttgatacactctttttgtagaatctgcaagtggatatttggatagctgtgaagatttcgttggaaaggggaatatcttcctataaaatctagacagaagcattctcagaaactgctctgtgatgtctgcattcaagtcacagagtttaacattgcctttcatagagcaggtttgaaacgctctttttgtagtatatggaagtggacttttcggacggtttgaggcccatggtgataaagggaatatcttcccctacaagctagaaagaagcattctgtgaaacttgtttgtgatgtgtgtactcatctaacagagttgaacctttctttttacagagcagttttgaaacactctttttgtagaatctgcgaggggatatttggatacatttcagcatttcgttggaaacgggaatatcttcatataaaatctcgacagaagcattctcagaaacttctttgtgatatgtgcattcaagtcacagagttgaatattccctttcacagagtaggtttgaaacactctttttgtagtatctggaagtggacatttggagcgctttgacacctacggtgaaaagggaaatatcttcccataaaaactagacagaagcaatctcagaatcttctttgggatatatgcacgcagccaacagagttgaacctttctattgacagagcagttttgaaacagtctttctgtggaatctgcaagtggatatttggatagcttggaggatttcgttggaaacgggattacgtataaaaagtagacagcagcatcctcagaaacttctttgtgatgtgtgcattcaagtcacagagttgaacattccctttcgtacagcagttttgaaacactctttctgtagcatctggaagtgaacattaggacagctttcagctctatggtgagaaaggaaatatcttcaaataaaaactagacagaagcactctcataaacttgtttgtgatgtgtgaactcagctaacagaggtggatctttcttttgatagagcagttctgaaaaacactttttgttgaatctgcaagtggacatttggatagatttgaagatttcgttggaaacgggaatatcttcatatcaaatctagacagaagcattctcagaaacgtctttgtgatgtttgcattcaactcatagagttgaacattccctttcagagagcagctttgaagcactctttttgtagcatgtgcaagtggacatttggagcgccctgaggcctacggggaaaaaagcaaatatcttcccataaccactagacagaaacattctcagaaaattctttatgacgtatgtactcaactagcagagaagaactttccttttgacagagcagttttgatacactctttttgtagaatctgcaagtggatatttggatagctgtgaagatttcgctggaaacgggaatatcttcctataaaacctagacagaagcattctcagaaacagctctgtgatgtctgcattcaagtcacagagttgaacattgcctttcatagagcaggtttgaaacgctctttttgtagtatatggaagtggacgtttcggacggtttgagacccatggtgataaagggaatatattctcctacaagctagaaagaagcattctgtgaaacttgtttgtgatgtatgtactcaactaacagagttgaacctttctttttacagagcagttttgaaacactctttttgtagaatctgcgaggggatatttggatacatttcaggatttcgttggaaacgggaatatcttcatagaaaatctcgacagaagcattctcagaaacttccttgtgatatgtgcattcaagtcacagagttgaatattccctttcacagagtaggtttgaatcactctttttgtagtatctggaagtggacatttggagcgccttgacacctaaggtgaaaagggaaatatcttcccataaaaactagacagaagcaatctcagaatcttctttgggatatatgcacgcagctaacagagttgaacctttctattgactgagcagatttgaaacagtctttctgtggaatctgcaagtggatatttggatagattggaggatatcgttggaaacgggattacgtataaaaagtagacagcaccatcctcagaaacttctttgtgatgtgtgcattcaagtcacagagttgaacattccctttcgtacagcagttttgaagcactctttctgtagtatctgggagtgaacattaggacagctttcaggtctatggtgagaaaggaaatatcttcaaataaaaactagacagaagcattctcataaacttgtttgtgatgtgtgaactcagctaacagagatggatctttcttttgatagagcagttctgaaaaacactttttgttgaatctgcaagtggacatttggatagatttgaagatttcgttggaaacgggaatatcttcatatcaaatctaggcagaagcattctcagaaacgtctttgcgatgtttgcattcaactcatagagttgaacattccgtttcagagagcagccttgaggcactctttttgtagtatgtgcaagtggatatttggagcgctctgaggcctacggtgaaaaagcaaatatcttcccataaccactagacagaaacattctcagaaactcctttatgacgtatgtactcaactaacagagaagaaccttccttttgacagagcagttttgatacactctttttgtagaatctgcaagcggatatttggatagctgtgaagatctcgttggaaacgggaatatcttcctataaaatctagacagaagcattctcagaaactgctctgtgatgtctgcattcaagtcacagagttgaacattgcctttcatagagcaggtttgaaacgctctttttgtagtatatggatgtggacgtttcggacggtttgaggcccatggtgataaagggaatatcttcccctacaagctagaaagaagcattctgtgaaacttgtttgtgatgtgtgtactcaactaacagagttgaacctttcttttcacagagcagttttgaaacactctttttgtagaatctgcgaggggatatttggatagatttcaccatttcgttggaaacgggaatatcttcatataaaatctcgacagaagcattcacagaaacttctttgtgatatctgcattcaagtcacagagttgaatattccctttcacagagtaggtttgaaacactctttgtggtatctggaagtggacatatcgagcaccttgacgcctacggtgaaaagggaaatatcttcccataaaaaccagacagaagcaatctcagaatcttctttgggatatatgcacgcagctaacagagttgaatctttctgttgacagagcagatttgaaacagtctttctgtggaatctgcaagtggatatttggatagattggaggatttcgttggaaacgggattacgtataaaaagtagacagcagcatcctcagaaacttctttgtgatgtgtgcattcaagtcacagagttgaacattccctttcgtacagcagttttgaaacactctttctgtagtatctggaagtgaacattaggacagatttcagctctatggtgagaaaggaaatatcttcaaataaaaactagacagaagcattctcataaacttgtttgtgatgtgtgaactcatctaacagaggtggatctttcttttgatagagcagttctgaaaaacactttttgttgaatctgcaagtggacatttggatagatttgaagatttcgttggaaacgggaatatgcttcatatcaaatctagacagaagcattctcagaaatgtctttgtgatgtttgcattcaactcatagagttgaacattccctttcagagagcagctttgaagcactctttttgtagtatgtgcaaggggatatttggagcgctctgaggcctaaggtgaaaaagcaaatatcttcccataaccactagacagaaacattctcagaaactgctttatgacgtatgcactcacctaacagagaagaaccttccttttgacagagcagttttgatacactctttttgtagaatctgcaagtggatatttggatagctgtgaagatttcgttggaaacgggaatatcttcctataaaatctagacagaagcattctcagaaactgctctgtgatgtctgcattcaagtcacagagttgaacattgcctttcatagagcaggtttgaaacgctcttattgtagtatatggaagtggacttatcggacggtttgaggcccatggtgataaagggaatatcttcccctacaagctagaaagaagcattctgtgaaacttgtttgtgatgtgtgtactcaactaacagagttgaacctttcttttcacagagcagttttgaaacactctttttgtagaatctgcgaggggaaatttggatagatttcaggatttcgttggaaacgggaatatcttcatacaaaatactcgacagaagcattctcagaaacttctttgtgatatgtgcattcaagtcacagagttgaatattccctttcacagagtaggtttgaaacactctttttgtagtatctggaagtggacatttggagcgccttgacgcctacagtgaaaagggaaatatcttctcataaaaagtagacagaagcaatctcagaatcttctttgggatatatgcacgcagctaacagagttgaacctttctattgacagagcagttttgaaacagtctttctgtggaatctgaaagtggatatttggatagcttggaggatttcgttggaaacgggattacgcataaaaagtagacagcagcatcctcagaaacttctttgtgatgtgtgcattcaagtcacagagttgaacattccctttcgtacagtagttttgaaacactctttctgtagtatctggaattgaacattaggacagctttcaggtctatggtgagaaaggaaatatcttcaaataaaaactagacagaagcattctcataaacttgtttgtgatgtgtgaactcagctaagagacgtggatctttcttttgatagagcagttctgaaaaacacgttttgttgaatctgcaagtggacatttggatagatttgaagatttcgttggaaacgggaatatcttcatatcaaatctagacagaagcattctcagaaacgtctttgtgacgtttgcattcaactcatagagttgaacattccctttcagagagcagctttgaagcactctttttgtagtatgtgcaaggggatatttggagcgctctgaggcctaaggtgaaaaagcaaatatcttcccataaccactagacagaaacattctcagaaactcctttatgacgtatgcactcacctaacagaaaagaaccttccttttgacagagcagtttttatacactctttttgtagaatctgcaagtggatatttggatagctgtgaagatttcgttggaaacgggaatatcttcctataaaatctagacagaagcattctcagaaactgctctcttatgtctgcattcaagtcacagagttgaacattgcctttcctagagcaggtttgaaacgctctttttgtagtatatggaagtggacgtttcggacggtttgaggaccatggtgataaagggaatatcttcccctacaagctagaaagaagcattctgtgaaacttgtttgtgatgtgtgtactcaactaacagagttgaacctttcttttcacagagcagctttgaaacactctttttgtagaatctgcgaggggatatttggatagatttcaggatttcgttggaaacgggtatatcttcatataaaatctcgacagaagcattctcagaaacttctttgtgatatgtgcattcaagtcacacagttgaatattccctttcacagagtaggtttgaaacactctttttgtagtatctggaagtggacatttggagcgccttgacacctacggtgaaaagggaaatatcttcccataaaaactagagagaagcaatctcagaatcttccttgggatatatgcacgcagctaacagagttgaacttttctattgacagagcagttttgaaacagtctttctgtggaatctgcaagtggatatttggatagcttggaggatttcgttggaaacgggattacgtataaaaagtagacagcagcatcctcagaaacttctttgtgatgtgtgcattcaagtcacagagttgaacattccctttcatacagcagttttgaaacactctttctgtagtatctggaagtgaacaataggacagctttcaggtctatggtgagaaaggaaatatcttcaaataaaaactagacagaaggattctcataaacttgtttgtgatgtgtgaactcagctaacagaggtggatctttcttttgatacagcagttttgaaaaacactttttgttgaatctgcaagtggacatttggatagatttgaagatttcgttggaaacgggaatatcttcatatcaaatctagacagaagcattctcagaaacgtctttgtgatgtttgcattcaactcatagagttgaacattccctttcagagagcagctttgaagcactctttttgtagtatgtgcaagtggatatttggagcgctctgaggcctacggggaaaaagcaaatatcttcccataaccactagacagaaacattctcagaaactcctttatgacgtatgctctcacctaacagagaagaaccttccttttgacagagcagttttgatacactctttttgtagaatctgcaagtggatatttggatagctgtgaagatttcgttggaaacgggaatatcttcctataaaatctagacagaagcattctcagaaaatgctctgtgatgtctgcattcaagtcacagagttgaacattgcctttcatagagcaggtttgaaacgctctttttgtagtatatggaagtggacgtttcggacggtttgaggcccatggtgataaagggaatatcttcccctacaagctagaaagaagcattctgtgaaacttgtttgtgatgtgtgtactcaactaacagagttgaacctttcttttcacagagcagttttgaaacactcttttcgtagaatctgcgaggggatatttggatagatttcagcatttcgttggaaacgggaatatcttcatataaaatctcgacagaagcattctcagaaacttccttgtgatatgtgcattcaagtcacagagttgaatattccctttcacagagtaggtttgaaacactctttttgtagtatctggaagtggacatttggagcgcctggacgcctacggtgaaaagggaaatatcttcccataaaaactagacagaagcaatctcagaatcttcttcgggatatatgcacgcagctaacagagttgaacctttctattgacagagcagttttgaaacagtctttctgtggaatctgctagtggatatttggatagcttggaggatttcgttggaaacgggattaagtataaaaagtagacagcagcatcctcagaatcttctttgtgatgtgtgcattcaagtcacagagttgaacattccctttcgtacagcagtgttgaaacactctttatgtagtatctggaagtgaacattaggacagctttcaggtctatggtgagaaaggaaatatcttcaaataaaaactagacagaagcattctcataaacttgtttgtgatgtgtgaactcagctaacagaggcggatctttcttttgatagagcagttcggaaaaacactttttgttgaatctgcaagtggacatttggatagatttgaagatttcgttggaaacgggaatatcttcatatcaaatctagacagaagcattctcagaaacgtctttgggatgtttgcattcaactcatagagttgaacattccctttcagagagcagctttgaagcactctttttgtagtatgtgcaagtggatatttggagcgctctgaggcctaaggtgaaaaagcaaatatcttcccataaccactagacagaaacattctcagaaactcctttatgacgtatgtactcaactaacagagaagaaccttccttttgacagaggagttttgatacactctttttgtagaatctgcaagtggatatttggatagctgtgaagatttcgttggaaacgggaatatcttcctataaaatccagacagaagcattctcagaaacagctctgtgatgtctgcattcaagtcacagagttgaacactgcctttcctagagcaggtttgaaacgctctttttgtagtatatggaagtggacgtttcggacggtttgagacccatggtgataaagggaatatattcccctacaagctagagagaagcattctgtgaaacttgtttgtgatgtttgtactcaactaacagagttgaacctttcttttacagagcagttttgaaacactctttttgtagaatctgcgaggggatatttggatacatttcaggatttcgttggaaacgggaatatcttcatataaaatctcgacagaagcattctcagaaacttctttgtgatatctgcattcaagtcacagagttgaatattccctttcacagagtaggtttgaaacactctttttgtagtgtctggaagtggaaatttggagcacattgacacctacggtgaaaagggaaatatcttcccattaaaactagacagaagcaatctcagaattttctttgggatatatgcacacagctaacagagttgaacttttctattgacatagcagttttgaaacggtctttctgtggaatctgcaagtggatatttggatagcttggaggatttcgttggaaacgggattacgtataaaaagtagacagcagcatcctcagaaacttctttgtgatgtgtgcattcaagtcacagagttgaacattccctttcgtacagcagttttgaaacactctttctgtagtatctggaagtgaacattaggacacctttcagctctatggtgagaaaggaaatatcttcaaataaaaactagacagaagcattctcataaacatgtttgtgatgtgtgaactcagctaaaagaggtggatctttcttttgatagagcagttctgaaaaacactttttgttgaatctgcaagtggacatttggatggatttgaagatttctttggaaacgggaatatcttcatatcaaatctagacagaagcattctcagaaacgtctttgtgatgtttgcattcaactcatagagttgaacattccgtttcaaagagcagctttgaggcactctttttgtagtatgtgcaagtggatatttggagcgctctgaggactaaggtgaaaaagcaaatatcttcccataaccactagacagaaacattctcagaaactcctttatgacgtatgcactcacctaacagaaaagaaccttccttttgacagagcagttttgatacactctttttgtagaatctgcaagtggatatttggatagctgtgaagatttcgttggaaacgggaatgtcttcctataaaatctagacagaagcattctcagaaactgctctgtgatgtctgcattcaagtcacagagttgaacattgcctttcatagagcaggtttgaaacgctctttttgtagtatatggaagtggacgtttcggacggtttgaggcccatggtgataaaggaaatatcttcccctacaagctagaaagaagcattctgtgaaacttgtttgtgatgtgtgtactcaactaacagagttgaacctttctttttacagagcagttttgaaacactctttttgtagaatctgcgaggggaaatttggatacatttcaggatttcgttggaaacgggaatatcttcatacaaaatctcgacagaagcattctcagaagcttctttgtgatatgtgcattgaagtcacagagttcaatattccctttcacagagtaggtttgaaacactctttttgtagtatctggaagtggacatttggagcgccttgacgcctacggtgaaaagggaaatatcttcccataaaaactagacagaagcaatctcagaatcttctttgggatatatgcacgcagctaacagagttgaacctttctattgacagagcagttttgaaacagtctttctgtggaatctgcaagtggatatttggatagtttggaggatttcgttggaaacgggattacgtataaaaattagacagcagcatcctcagaaacttctttgtgatgtgtgcattcaagtcacagagttgaatattccctttcatacagcagttttgaaacactctttctgtagtatctggaagtgaactttaggagagctttcaggtatatagtgagaaaggatatatcttcaaataaaaactagacagaagcattctcataaagttgtttgtgatgtgtgaactcagctaacagaggtggatctttcttttgatagagcagttctgaaaaacactttttgttgaatctgcaagtggacatttggatagacttgaagatttcgttggacacgggaatatcttcatatcaaatctagacagaagcattttcagaaacgtctttgtgatgtttgcattcaactcatagagttgaacattccgtttcagagagcagctttgaggcacactttttgtagtatgtgcaagtggatatttggagcgctctgaggcctacggtgaaaaagcaaatatcttcccataaccactagacagaaacattctcagaactcctttatgacgtatgcactcacctaacagagaagaaccttccttttgacagagcagttttgatacactctttttgtagaatctgcaagtggatatttggatagctgtgaagatttcgttggaaacgggaatatcttcctataaaatctagacagaaggattctcagaaactgctctgtgatgtctgcattcaagtcacagagttgaacattgcctttcatagagcaggtttgaaacgctctttttgtagtatatggaagtggacgtttcggacggtttgaggccaatggtgataaagggaatatcttcccctaccagctagaaagaagcattctgtgaaacttgtttgtgatgtgtgtactcaactaacagagttgaacctttctttttacagagcagttttgaaacacgctttttgtagaatctgcgaggggatatttggatagatttcaggatttcgttggaaacgggaatatcttcatataaaatctcgacagaagcattctcagaaacttcattgtgatatctgcattcaaggcacagagttgaatattccctttcagagagtaggtttgaaacactctttttgtagtatctggaagtggacatttggagcgccttgacacctacggtgaaaagggaaatatcttcccataaaaactagacagaagcaatctcagaatcttctttgggatatatgcacgcagctaacagagttgaacctttctattgacagagcagttttgaaacagtatttctgtggaatctgcaagtggatatttggatagcttggaggatttcgttggaaaagggattacgtataaaaagtagacagcagcatcctcagaaacttctttgtgatgtgtgcattcaagtcacagagttgaacattccctttcgtacagcagttttgaaacactctttctgtagtatctggaagtgaactttaggagagctttcaggtctatagtgagaaaggaaatatcttcaaataaaaactagacagaaagcattctcataaacttctttgtgatgtgtgaactcagctaaccgaggtggatctttcttttgatagagcagttctgaaaaacactttttgttgaatctgcaagtggacatttggatagatttgaagatttcgttggaaacgggaataacttcatttcaaatctagacagaagcattctcagaaacgtctttgtgacgtttgcattcaactcatagagttgaacattccgtttcagagagcagctttgaggcactctttttgtagtatgtggaagtggatatttggagcgctctgaggcctacggtgaaaaagcaaatatattcccataaccactagacagaaacattctcagaaattcctttatgacgtatgcactcacctaacagagaagaaccttccttttgacagagcagttttgatacactctttttgtagaatctgcaagtggatatttggatacctgtgaagatttcgttggaaacgggaatatcttcctataacatctagacagaagcattctcagaaactgctctgtgatgtctgcattcaagtcacagagttgaacattgcctttcatagagcaggtttgaaacgctctttttgtactatatggaagaggacgtttcggacggtttgaggcccatggtgataaagggaatatcttcccctacaagctagaaagaagcattctgtgaaacatgtttgtgatgtgtgttctcaactaacagagttgaacctttctttttacagagcacttttgaaacactctttttgtagaatctgcgaggggatatttggatagatttcaggatttcgttggaaacgggaatatcttcatataaaatctcgacagaagcattctcagaaacttctttgtgatatctgcattcaagtcacagagttgaatattccctttcacagagtaggtttgaaacactctttttgtagtgtctggaagtggacatttggagcacattgacacctacggtgaaaagggaaatatcttcccataaaaactagacagaagcaatctcagaatcttctttgggatatatgcacgcagctaacagagttgaacctttctattgacagagcagttttgaaacagtctttctgtggaatctgcaagtggatatttcgatagcttggaggatttcgttggaaacgggattacgtataaaaagtagccagcagcatcctcagaaacttctttgtgatgtgtgcattcaagtcacagagttgagcattccctttcgtacagcagttttgaaacactctttctgtagtatctggaagtgaacattaggacagctttcaggtctatggtgagaaaggaaatatcttcaaataaaaactagacagaagcattctcataaacttgtttgtgatgtgtgaactcagctaacagaggtggatctttcttttgatagaacagttctgaaaaacactttttgttgaatctgcaagtggacatttggatagatttgaagatttcgttggaaacgggaatatcttcatatcaaatctagacagaaagcattctcagaaacgtctttgtgatgtttgcattcaactcatagagttgaacattccgtttcagagaccagctttgaagcactctttttgtagtatgtgcaagtggatatttggagcgctctgaggcctacggtgaaaaagcaaatatcttcccataaccactagacagaaacatgctcagaaactcctttatgacgtatgcactcacctaacagagaagaaccttccttttgacagagcagttttgatacactctttttgtagaatctgcaagtggatatttggatagctgtgaagatttcgttggaaacgggaatatcttcctataaaatctagacagaagcattctcagaaactgctctgtgatgtctgcattcaagtcacagagttgaacattgcctttcatagagcaggtttgaaaccctctttttgtagtatatggaagtggacgtttcggacggtttgaggcccatggtgataaagggaatatcttcccctacaagctagaaagaagcattctgtgaaacttgtttgtgatgtgtgtactcaactaatagagttgaacctttctttttacagagcagttttgaaacactatttttgtagaatctgcgaggggatatttggatagatttcaggatttcgttggaaacgggaatatcttcatataaaatctcgacagaagcattctcagaaacttcattgtgatatctgcattcaagtcacagagttgaatattccctttcacagagtaggtttgaaacactctttttgtagtatctggaagtggacatttggagcgccttgacacctacggtgaaaagggaaatatcttcccataaaaactagacagaagcaatctcagaatcttctttgggatatatgcacgcagctaacagagttgaacctttctactgacagagcagtttagaaacagtctttctgtggaatctgcaagtggatatttggatagattggaggatttcgttggaaacgggattacgtataaaaagtagacagcagcatcctcagaaacttccttgtgatgtgtgcattcaagtcacagagatgaacattccctttcgtacagcagttttgaaacactctttctgtagtatctggaagtgaacattaggagggctttcaggtctatagtgagaaaggatatatcttcaaataaaaactagacagaagaattctgataaacttgtttgtgaagtgtgaactcagctaacacaggtggatctttcttttgatacagcagttttgaaaaacactttgttgaatctgcaagtggacatttggatagatttgaagatttcgttggaaacgggaatatcttcttatcaaatctagacagaagcattctcagaaacgtctttgtgatgtttgcattcaactcacagatttgaacattccctttcagagagcagctttgaagcactctttttgtagtatgtgcaaggggatatttggagcgctctgaggcctacggtgaaaaagcaaatatcttcccataaccactagacagaaacattctcagaaactcctttatgacgtatgcactcacctaacagagaagaagcttccttttgacagagcacttttgatacactctttttgtagaatctgaaagtggatatttggatagctgtgaagatttcgttggaaacgggaatatcttcctataaaatctagacagaagcattctcagaaactgctctgtgatgtctgcattcaagtcacagagttgaacattgcctttcatttagcaggtttgaaacgctctttttgtagtatatggaagtggacgtttcggacggtttgaggcccatggtgataaagggaatatcttcccctacaagctagaaagaagcattctgtgaaacttgtttgtgatgtgtgtactgaagtaacagagttgaacctttctttttacagagcagttttgaaacactctttttgtagaatctgcgaggggatatttggatagaattcaggatttcgttggaaacgggaatatcttcatagaaaatctcgacagaagcattctcagaagcttcgttgtgatatgtgcattcaagtcacagagttgaatattccctttcacagagtaggtttgaaacacactttttgtagtatctggaagtggacttttggagcgccttgatgcctacggtgaaaagggaaatatcttctcataaaaagtagacagaagcaatctcagaatcttctttgggatatatgcacgcagctaacagagttgaacctttctattgacagagcagttttgaaacagtctttctgtggaatctgcaagtggatatttggatagcttgggaggatttcgttggaaacgggattacgtataaaaagtagacagcagcatcctcagaaacttctttgtgatgtgtgcattcaagtcacagagttgaacattccctttcttacagcagttttgaaacgctctttctgtagtatctggaagtgaacattaggacagctttcaggtctatggtgagaaaggaaatatcttcaaataaaaactagacagaagcattctcataaacttgtttgtgatgtgtgaactcagctaacagacgtggatctttcttttgatacagcagttttgaaaaacactttttgttgaatctgcaagtggacatttggatagatttgaagatttcgttggaaacgggaatatcttcatatcaaatactagacagaatcattcccaaaaacgtctttgtgatgtttgcattcaactcatagagttgaacattccgtttcagagagcagctttgaagcactctttttgtagtatgtgcaaggggatatttggagtgctctgaggcctaaggtgaaaaggcaaatatcttcccataaccactagacagaaacattctcagaaactcctttatgacgtatgcactcacctaacagagaagaaaccttccttttgacagagcagttttgatacactctttttgtagaatctgcaagtggatatttggatagctgtgaagatttcgttggaaacgggaatatcttcctataaaatctatacagaagcattctcagaaactgctctgtgatgtctgcattcaagtcacagagttgaacattgtctttcctagaacaggtttgaaacgctctttttgtagtatatggaagtggacgtttcggacggtttgaggcccatggtgataaagggaatatcttcccctacaagctagaaagaagcattctgtgaaacttgtttgtgatgtgtgtactcaactaacagagttgaacctttgtttttacagagcagttttgaaacactctttttgtagaatctacgaggggatatttggatacatttcagcatttcgttggaaacgggaatatcttcatataaaatctcgacagaagcattctcagaaacttctttgtgatatctgcattcaagtcacagagttgaatattccctttcacagagtaggtttgaaacactccttttgtagtatctggaagtggacatttggatcgccttgacgcctacggtgaaaagggaaatatcttctcataaaaactagacagaagcaatctcagaatcttctttgggatatatgcacgcagttaacagagttgaacctttctattgacagagcagttttgaaacagtctttctgtggaatctccaagtggatatttggatagcttggagcatttcgttggaaacgggattacgtataaaaagtagacagcagcatcctcagaaacttctttgtgatgtgtgcattcaagtcacagggttgaacattccctttcgtacagcagttttgaaacactctttctgtagtaactggaagtgaacattaggacagctttcaggtctatggtgagaaaggaaatatcttcaaataaaaactagacagaagcattctcataatcttgtttgtgatgtgtgaactcagctaacagacgtggatctttcttttgatacagcagttttgaaaaacactttttgttgaatctgcaagtggacatttggatagatatgaagatttcgttggaaacgggaatatcttcatatcaaatctagacagaagcattctcagaaacgtctttgtcatgtttgcattcaactcatagagttgaacattccgtttcagagagcagctttgaagcactctttttgtagtatgtgcaagtggatatttggagcgctctgaggcctaaggtgaaaaagcaaatatcttaccgtaaccactagacagaaacattctcagaaactcctttatgacgtatgtactcaactaacagagaagaaccttccttttgacagagcagttttgatacactctttttgtagaatctgcaagtggatatttggatagctgtgaagatttcgctggaaacgggaatatcttcctataaaatctagacagaagcattctcagaaactgctctgtgatgtctgcattcaagtcacagagttgaacattgcctttcatagagcaggtttcaaacactctttttttagtatatggaagtggacgcttcggacggtttgaggcccatggtgatacagggaatatcttcccctacaagctagaaagaagcattctgtgaaagttgtttgtgatgtgtgtactcaactaacagagttgaacctttgtttttacagagcagttttgaaacactctttttgtagaatctgcgaggggatatttggatagatttcaggatttcattggaaacgggaatatcttcatataaaatctcaacagaagcattctcagaaacttctttgtgatatgtgcattcaagtcacaggtttgaatattccctttcacagagtaggtttgaaacactctttttgtagtatctggaagtggacatttggagcgccttgacgcctaaggtgaaaagggaaatatcttcccataaaaactagacagaagcaatctcagaatcttctttgggatatatgcaccgcagctaacagagttgaacctttctattgacagagcagttttgaaacagtctttctgtggaatctgcaagtggatatttggatagcttggaggatttcgttggaaacgggattacgcataaaaagtagacagcagcatcctcagaaacttctttgtgatgtgtgcattcaagtcacagagttgaatattccctttcgtacagcagttttgaaacactctttctgtagtatctggaagtgaacactaggacagctttcaggtctatggtgagaaaggaaatatcttcaaataaaaactagacagaagcattctcttaaacttgtttgtgatgtgtgaactcagctaacagatgtggatctttcttttgatataacagttttgaaaaacactttttgttgaatctgcaaatggacatttggatagatttgaagatttcgttggaaacgggaatatcttcatatcaaatctagacagaagcattctcagaaacgtctttgtgatgtttgcattcaactcatagagttgaacattccgtttcagagagcagctttgaagcactctttttgtagtatgtgcaagtggatatttggatcgctctgaggcctacggtgaaaaagcaaatatcttcccataaccactagacagaaacattctcagaaactcctttatgacgtatgcactcacctaacagagaagaaccttccttttgacagagcagttttgatacactctttttgtagaatctgcaagtggatatgtggatagctgtgaagatttcgttggaaacgggaatatcttcctataaaatctagacagaagcattctcagaaactgctctgtgatgtctgcattcaagtcacagagttgaacattgcctttcatagagcaggtttgaaacgctctttttgtagtatatggaagtggatgtttcggacggttggaggcccatggtgataaagggaatatcttcccctacaagatagaaagaagcattctgtgaaacttgtttgtgatgtgtgtactcaactaagagagttgaacctttcttttcacagagcagttttgaaacactctttttgtagactctccgaggggatatttggatagatttcaggatttcgttggaaacgggaatatcttcatacaaaatctcgacagaagcattctcagaaacttctttgtgatatgtgcattcaagtcacagagttgaatattccctttcacagagtaggtttgaaacactcttttggtagtatctggaagtggacatttggagcgccttgacacctacggtgaaaagggaaatatcttcccatcaaaactagacagaagcaatctcagaatcttctttgggatatatgcatgcagctaacagagttgaacctttctattgacagagcagttttgaaacagtctttctgtggaatctgcaagtggatatttggatagcttggaggatttcgttggaaacgggattacgtataaaaagtagacagcagcatcctcagaaacttctttgtgatgtgtgcattcaagtcacagagttgaacattccctttcgtacagcagttttgaaacactctttctgtagtacctggaagtgaacattaggacagctttcaggtctatggtgagaaaggaaatatcttcaaataaaaactagacagaagcattctcataaacttgtttgtaatgtgtgaactcagctaacacacgtggatctttcttttgatagagcagttctgaaaaacactttttgttgaatctgcaagtggacatttggatagatttgaagatttcgttggaaacgggaatatcttcatatcaaatctagacagaagcattctcagaaacgtctttgcgatgtttgcattcaactcatagagttgaacattccgtttcagagagcagctttgaggcactctttttgtagtatgtgcaagtggatatttggagcgctctgaggcctacggtgaaaaagcaaatatcatcccataaccactagacagaaacattctcagaaactcctttatgatgtatgcgctcacctaacagagaagaaccttccttttgacagagcacttttgatacactctttttgtagaatctgcaagtggatatttggatagctgtgaagatttcgttggaaacgggaatatcttcctataaaatctagacagaagcattctcagaaaccgctctgtgatgtctgcattcaagtcacagagttgaacattgcctttcatagagcaggtttgaaacgctctttttgtagtatatggaagtggatgtttcggacggttggaggcccatggtgataaagggaatatcttcccctacaagctagaaagaagcattctgtgaaacttgtttgtgatgtgtctactcaactaacagagttgaacctttctttttacagagcagttttgaaacactctttttgtagaatctgcgaggggatatttggatacatttcaggatttcgttggaaacgggaatatcttcatataaaatctcgacagaagcattctcagaaacttccttgtgatatgtgcattcaagtcacagagttgaatattccctttcacagagtaggtttgaaacactctttttgtagtatctggaagtggacatttggagcaccttgacgcctacggtgaaaagggaaatatcttcccataaaaactagacagaagcaatctcagaatcttctttgggatatatgcacgcagctaacagagttgaacctttctattgacagagcagttttgaaacagtctttctgtggaatctgcaagtggatatttcgatagcttggaggatttcgttggaaacgggattacgtataaaaagtagacagcagcatcctcagaaacttctttgtgatgtgtgcattcaagtcacagagttgaacattccctttcgtacagcagttttgaaacactctttctgtagcatctggaagtgaacattaggacagctttcaggtctatgttgagaaaggaaatatcttcaaataaaaactagacagaagcattctcataaacttctttgtgatgtgtgaactcagctaacagaggtggatctttcttttgatagagcagttctgaaaaacactttttgttgaatctgcaagtggacatttggatagatatgaagatttcgttggaaacgggaatatcttcatatcaaatctagacagaagcattctcagaaacgtctttgcgatgtttgcattcaactcatagagttgaacattccgtttcagagaccagctttgaagcactctttttgtagtatgtgcaagtggatatttggagcgctctgaggcctacggtgaaaaagcaaatatcttcccataaccactagacagaaacattctcagaaactcctttatgacgtatgcactcacctaacagagaagaaccttccttttgacagagcagttttgatacactctttttgtagaatctgcaagtggatatttggatagctgtgaagatttcgttggaaacgggaatatattcctataaaatctagacagaagcattctcagaaactgctctgtgatgtctgcattcaagtcacagagttgaacattgcctttcatagagcaggtttgaaacgctctttttgtagtatataaaagtggacgtttcggacggtttgaggcccatggtcataaagggaatatcttcccatacaagctagaaagaagcattctgagaaactagtttgtgatgtgtgtattcaactaacagcggtgaacctttctttttacagagctgttttggaaaactctttttgtagaatctgcgaggggatatttgcataggtttcaggatttcgttggaaacgggaataacttcatataaaatctcgacagaagcattctcagaaacttctttgtgatatctgccttcaagtcacagagttgaatattccctttcacagagtaggtttgtaacactctttttgtagtatctggaagtggacatttggagcgccttgacgcctacggtgaaaagggaaatatcttcccataaaaactagacagaagcaatctcagaatcttctttgggatatatgcacgcagctaacagagttgaacctttctattgacagagcagttttgaaacagtctttctgtggaatctgcaagtggatatttggatagcttggagggtttcgttggaaacgggattacgtataaaaagtagacagcagcatcctcagaaacttctttgtgatgtgtgcattcaagtcacagagttgaacattccctttcgtacagcagttttgaaacactctttctgtagtatctggaagtgaacattagtacagctttcagggctatggtcagaaaggaaatatcttcaaataaaaactagacagaagcattctcataaacttgtttgtgatgtgtgaactcagctaacgcacgtggatctttcttttgatagagcagttctgaaaaacactttttgttgaatctgcaagtggacatttggatagatttgaagatttcgttggaaacgggaatatcttcatatcaaatctagacagaagcattgtcagaaacgtctttgtcatgtttgcattcaactcttagagttgaacattccgtttcagagagcagctttgaagcactctttttgtagtatgtgcaagcggatatttggagcgctctgaggcctacggtgaaaaagcaaatatcttcccataaccactagacagaaacattctcaaaaactcctttatgacgtatgtactcaactgacagagaagaactttccttttgacggagcatttttgatacactctttttgtactgtctgcaagtggatatttggatagctgtgaagatttcgttggaaacgggaatatcttcctataaaacctagacagaagcattctcagaaactgctctgtgatgtctgcattcaagtcacagagttgaacattgcctttcatagagcaggtttgaaacgctctttttgtagtatatggaagtggacgtttcggagggtttgaggcccatggtgataaagggaatatcttcccctacaagctagaaagaagaattctgtgaaacttgtttgtgatgtgtgtactcaactaacagagttgaacctttctttttacagagcagttttgaaacactctttttgtagaatctgcgaggggatatttggatagatttcaggatttcgttggaaacgggaatatcttcatataaaatctcgacagaagcattctcagaaacttctttgtgatatctgcattcaagtcacagagttgaatattccctttcacagagtaggtttgaaacactccttttgtagtatctggaagtggacatttggatcgccttgacacctacggtgaaaagggaaatatcttctcataaaaactagacagaagcaatctcagaatcttctttgggatatatgcacgcagctaacagatttgcacctttctattgacagagcagttttgaaacagtctttctgtggaatctgcaagtggatatttggatagcttggaggatttcgttggaaacgggattacgcataaaaagtagacagcagcatcctcagaaacttctttgtgatgtgtgcattcaagtcacagatttgaacattcccttttgtacaccagttttgaaagactctttctgtagcatctggaagtgaacattaggacagctttcaggtctatggtgagaaaggaaatatcttcaaataaaaactagacagaagcattctgataaacttgtttgtgaagtgtgatctcagctaacagaggtggatctttcttttgatagagcagttctgaaaaacactttgttgaatctgcaagtggacatttgtatagatttgaagatttcgttggaaacgggaatttcttcatatcaaatctagatagaagcaatctcagaaacgtctttgtgatgtttgcattcaactcatagagttgaacattccgtttcagagagcagctttgaagcactctttttgtagtatgtgcaagcggatatttggagcgctctgaggcctacggtgataaagcaaatatcttcccataaccactagacagaaacattctcagaaactcctttatgacgtatgcactcacctaacagaaaagaaccttccttttgacagagcagttttgatacaatctttttgtagaatctgcaagtggatatttggatagctgtgaagatttcgttggaaacgggaatatcttcctataaaatctagacagaagcattctcagaaactgctctgtgatgtctgcattcaagtcacagagttgaacattgcctttcatagagcaggtttgaaacgctctttttgtagtatatggaagtggacttttcggacggtttgaggcccatggtgataaagggaatatcttcccctacaagctagaaagaagcattctgtgaaacttgtttgtgatgtgtgtactcaactcacaggagttgaacctttctttttacagagcagttttgaaacactctttttgtagaatctgcgagggcatatttggatagatttcaggatttcgttggaaaggggaatatcttcatataaaatctcgacagaagcattctcagaaacttctctgtgatatgtgcattgaagtcaccgagttaaatattcccttccacacagtaggtttgaaacactctttttttgtagtatctggaagtggaaatttggagcgctttgatgcctatggtgaaaaaggaaatatcttccaataaaaactagtcagaagcaatctcagaatcttctttgggatatatgcacgcagctaacagagttgaacctttctattgacagagcagtttagaaacagtccttctgtggaatctgcaagtggatatttggatagcttggaggatttctttggaaaccgggattacgtataaaaagtagacagcagcatcctcagaaacttctttgtgatgtgtgcattcaagtcacagagttgagcattccctttcgtacagcagttttgaaacactctttctgtagtatctggaagtgaacattaggacagctttcagctctatggtgagaaaggaaatatcttcaaataaaaactagacagaagcattctcataaacttgtttgtgatgtgtgaactcagctaagagaggtggatctttcttttgatagagcagttctgaaaaacactttttgttgaatccgcaagtggacatttggatagatttgaagatttcgttggaaacgggaatatcttcatatcaaacctagacagaagcattctcagaaacgtctttgtgatgtttgcattcaactcatagagttgaacattccctttcagagagcagctttgaagcactctttttgtagtatgtgcaaggggatatatggagcgctctgaggcctaaggtgaaaaagcaaatatcttcccataaccactagacagaaacattctcagaaactcctttatgacatatgtactcaactaacagagaagaaccttccttttgacagagcagttttgatacactctttttgtagaatctgcaagtggatatttggatagctgtgaagatttcgttggaaacgggaatatcttcctataaaatctagacagaagcattctcagaaactgctctgtgatgtctggattcaagtcacagagttgaacattgccgttcatagagcaggtttgaaacactctttttgtagtatatggaagtggacgtttcggacggtttgaggcccatggtgataaagggaatatcttcccatacaagctagaaagaagcattctgtgaaacttgtttgtgatgtgtgtactcatctaacagagttgaacctttctttttacagagcagttttgaaacactctttttgtagaatctgcgtggggatatttggatagatttcaggatttcgttggaaacgggaatatcttcatataaaatctcgacagaagcattctcagaaacttctttgtgatatctgcattcaagtcacagagttgaatattccctttcacagagtaggtttgaaacactctttttgtagtatctggaagtggacattttgagcgccttgacacctacggtgaaaagggaaatatcttcccataaaaactagacagaagcaatctcagaatcttctttgggatatatgcacgcagctaacagagttgaacctttctattgacagagcagttttgaaacagtctttctgtggaatctgcaagtgcatatttggatagcttggaggatttcgttgtaaacgggattacgtataaaaattagacagcagcatcctcagaaacttctttgtgatgtgtgcattcaagtcacagagttgaacattccctttcgtacaacagttttgaaacactctttctgtagcatctggaagtgaacatttggacagctttcaggtctatggtgagaaaggaaatatcttcaaataaaaactagacagaagcattctcataaacttgtttgtgatgtgtaaactcagctaacagaggtggatctttcttttgatagagcagttctgaaaaacactttttgttgaatctgcaagtggacatttggatagatttgaagatttcgttggaaacgggaatatcttcatatcaaatctagacagaagcattctcagaaacgtctttgtgatgtttgcattcaactcatagagttgaacgttccgtttcagagaccagctttgaagcactctttttgtagtatgtgcaagtggatatttggagcgctctgaggcctacggtgaaaaagcaaatatcttcccataaccactagacagaaacattctcagaaactcctttatgacgtatatactcaactaacagagaagaaccttccttttgacagagcagttttgatacactctttttgtagaatctgcaagtggatatttggatagctgtgaagatttcgttggaaacgggaatatcttcctataaaatctagacagaagtattctcagaaacagctctgtgatgtctgcattcaagtcacagagttgaacattgcctttcatagagcaggtttgaaacgctctttttgtagtatatgtaactggaggtttcggacggtttgaggcccatggtgataaagggaatatcttcccctacaagctagaaagaagcattctgtgaaacttgtttgtgatgtgtgtactcaactaacagtgttgaacctttctttttacagagtagttttgaaacactatttttgtagaatctgcgaggggatatttggatagatttcaggatttcgttggaaacgggaatatcttcatataaaatctcgacagaagcattctcagaaacttctttgtgatatctgcattcaagtcacagagttgaatattccctttcacagagtaggtttgaaacactctttttatagtatctggaagtggacatttggagcgccttgacacctacggtgaaaagggaaatatcttcccataaaaactagacagaagcaatctcagaatcttctttgggatatatgcacgcagctaacagagttgaacctttctattgacacagcagtttagaaacagtctttctgtggaatctgcaagtggatattgggatagcttggaggatttcgttggaaacgggattacgtataaaaagtagacagcagcatcctcagaaacttctttgggatgtgtgcattcaagtcacagagttgaacattccctttcgtacagcagttttgaaacactctttctgtagtatctggaagtgaacattaggacagctttcaggtctatggtgagaaaggaaatatcttcaaataaaaactagacagaagcattctcataaacttgtttgtgatgtgtgaactcagctaacagaggtggatctttcttttgatagagcagttctgaaaaacactttttgttgaatctgcaagtggacattcggatagatttgaagatttcattggaaacgggaatatcttcatatcaaatctagacagaagcattctcagaaacgtctttgtgatgtttgcattcaactcatagagttgaacattccctttcagagagcagctttgaagcactctttttgtagtatgtgcaaggggatatttggagcgctctgaggcctaaggtgaaaaagcaaatatcttcccataaccactagacagaaacattctcagaaactcctttatgacgtacgcactcacctaacagagaagaaccttccttttgacagagcagttttgatacactctttttgtagaatctgcaagtggatatttggatagctgtgaagatttcattggaaacgggaatatcttcctataaaatctagacagaagcattctcagaaactgctctgtgatgtctgcattcaagtcacagagttgaacattgcctttcatagagcaggtttgaaacgctctttttgtagtatatggaagtggacgtttcggacggtttaaggcccatggtgataaagggaatatcttcccctactagctagaaagaagcattctgtgaaacttgtttctgatgtgtgtactcaactaacagagttgaacctttcttttcacagagcagttttgaaacactctttttgtagaatctgcgagcggatatttggatagatttcaggatttcgttggaaacgggaatatcttcatataaaatctcgacagaagcattctcagaaacttctttgtgatatctgcattcaagtcacagagttgaatattccctttcaccgagtaggtttgaaaaactctttttgtagtatctggaagtggacatttggagcgccttgacgcctacggtaaaaagggaaatatcttcccataaaaactagacagaagcaatctcagaatcttctttgggatatatgcacgcagctaacagagttgaacctttctattgacagagcagttttgaaacagtctttctgtggaatctgcaattggatatttggatagcttggaggatttcgttggaaacgggattacgtataaaaagtagacagcagcatcctccgaaacttctttgtgatgtgtgcattcaagtcccagagttgaacattccctttcgtacagcagttttgaaacactctttctgtagtatctggaagtgaacattaggacagctttcagctctatggtgagaaaggaaatatcttcaaataaaaactagacagaagcattctgataaacttgtttgtgatgtgtgaactcagctaacagaggtggatctttctttggtacagcagttttgaaaaacactttgttgaatctgcaaggggacatttggatagatttgaagattacgttggaaacgggaatatcttcatatcaaatctagacagaagcattctcagaaacgtctttgtgatgttggcattcaactcatagagttgaacattccgtttcagagagcagctttgaagcactctttttgtagtatgtgcaagtggatatttggagcgctctgaggcctaaggtgcaaaagcaaatatcttcccgtaaccagtagacagaaacattctcagaaactcctttatgacgtatgtactcaactaacagagaagaatcttccttttgacagagcagttttgatacactctttttgtagaatctgcaagtggatatttggatagctgtgaaggtttcgttggaaacggaaatatcttcctataaaatctacacagaagcattctcagaaactgctctgtgatgtctgtattcaagtcacagagttgaacattgcctttcatagagcaggtttgaaacgctctttttgtagtatatggaagtggatgtttcggacggttggaggcccatggtgataaagggaatatcttcccctacaagctagaaagaagcattctgtgaaacttgtttgtgatgtgtgtactcaactaacagagttgaacctttcttttcacagagcagttttgaaacactctttttgtagaatttgcgaggggatatttggatagatttcaggatttcgttggaaacgggaatatcttcatacaaaatctcgacagaagcattctcagaaacttctttgtgatatgtgcattcaagtcacagagttgaatattctctttcacagagtaggtttgaaacactctttttgtagtatctggaagtggacatttggagtgccttgacacctacggtgaaaagggaaatatcttcccataaaaactagacagaagcaatctcagaatcttctttgggatacatgcacgcagctaacagagttgaacctttctattgacagagcagttttgaaacagtctttctgtggaatctgcaagtggatatttggatagcttggaggatttcgttggaaacgggattaagtataaaaagtagacagccgcatcctcagaaacttctttgtgatgtgtgcattcaagtcccagagttgaacattccctttcgtacagcagttttgaaacactctttctgtagtatctggaagtgaacattaggacagctttcaggtctatggtgagaaaggaaatatcttcaaataaaaactagacagaagcattctcataaacttgtttgtgatgtgtgaactcagctaacagaggtggatctttcttttgatagagcagttctgaaaaacactttttgttgaatctgcaagtggacatctggatagatttgaagatttcgttggaaacgggaatatcttcatatcaaatctagacagaagcattctcagaaacgtctttgtgatgtttgcattcaactcatagagttgaacattccgtttcagagagcagctttgaagcactctttttgtagtatgtgcaagtggatattttgagcgctctgaggcccacggtgaaaaagcaaatatcttcccataaccactagacagaaacattctcagaaactcctttatgacgtatgcactcacctaacagagaagaaccttccttttgacagagcagttttgatacactctttttgtagaatctgcaagtggatatttggatagctgtgaagatttcgttggaaacgggaatatcctcctataatatctagacagaagcattctcagaaactgctctgtgatgtctgtattcaagtcacagagttgaacattgcctttcatagagcaggtttgaaacgctctttttgtagtatatggaagtggatgtttcggacggtttgaggcccatggtgataaagggaatatcttcccctacaagctagaaagaagcattctgtgaaacttgtttgtgatgtgtgtactcaagtaacagagttgaacctttctttttacagagcagttttgaaacactctttctgtagaatctgcgaggggatatttggatagatttcaggatttcgttggaaacgggaatatcttcatataaaatctcgacagaagcattttcagaaacttctttgtgatatgtgcattcaagtcacagagttgaatattccctttcacagagtacgtttgaaacactctttttgttgtatctggaagtggacatttggagcgccttgacgcctacggtgaaaagggaaatatcttcccataaaaactagacagaagcaatctcagaatcttctttgggatatatgcacgcagctaacagagttgaacctttctattgacagagcagtattgaaacagtctttctgtggaatctgcaagtggatatttggatagcttggaggatttcgttggaaacgggattacgtataaaaagtagacagcagcatcctcagaaacatccttgtaatgtgtgcattcaagtcacagagttgaacattccctttcgtacagcagttttgaaacactctttctgtagtatctggaagtgaactttaggacagctttcaggtctatcgtgagaaaggatatatcttcaaataaaaactagacagaagcattctgataaacttgtttgtgaagtgtgaactcagctaacagaggtggatctttcttttgatagagcaattctgaaaaacactttgttgaatctgcaagtggacatttggatagatttgaagatttcgttggaaacgggaatatcttcatatcaaatctagacagaagcattctcagaaacgtctttgtgatgttggcattcaactcatagagttgaacattccgtttcagagagcagctttgaagcactctttttgtagtatgtgcaaggggatattttgagcgctctgaggcctaaggtgaaaaagcaaatatcttcccataaccactagacagaaacattctcagaaactcctttatgacgtatgcactcacctaacagagaagaaccttccttttgacagagcagttttgatacactctttttgtagaatctgcaagtttatatttggatagctgtgaagatttcgttggaaacgggaatatcttcctataaaatctagacagaagcattctcagaaactgctctgtgatgtctgcattcaagtcacagagttgaacattgtctttcatagagcaggtttgaagcgctctttttgtagtatatggaagtggacgtttcggacggtttgaggcccatggtgataaagggaatatcttcccctacaagctagaaagaagcattctgtgaaacttgtttgtgatgtgtgtactcaactaacagagttgaacctttctttttacagagcagttttgaaacactctttttgtagaatctgcgaggggatatttggatagatttcaggatttcgttggaaacgggaagatcttcatataaaatctcgacagaagcattctcagaaacttccttgtgatatgtgcattcaagtcacagagttgaatattccctttcacagagtaggtttgaaacactctttttgtagtatctggaagtggtcatttggagcgccttgacgcccacggtgaaaagggaaatatcttcccataaaactagacagaagcaatctcagaatcttctttgggatatatgcatgcagctaacagagttgaacctttctattgacagagcagttttgaaacagtcttactgtggaatctgcaagtggatatttggatagcttggaggatatctttggaaacgggattacgtataaaaagtagacagcagcatcctcagaaacttctttgtgatgtgtgcattcaagtcacagagttgaacattccctttcgtacagcagttttgaaacactctttctgtagtatctggaagtgaacattaggacagctttcaggtctatggtgagaaaggaaatatcttcaaataaaaacttgagagaagcattctcataaatttgtttgtgatgtgtgaactcagctaacagaggtggatctttcttttgatagagcagttctgaaaaacactttttgttgaatctgcaagtggacatttggatagatttgaagatttcgttggaaacgggaatatcttcatatcaaatgctagacagaagcattctcagaaacgtctttgcgatgtttgcattcaactcatagagttgaacattccgtttcagagagcagctttgaggcactctttttgtagtatgtgcaagtggatatttggagcgctctgaggcctacggtgaaaaagcaaatatccttcccataaccactagacagaaacattctcagaaactcctttatgacgtatgcactcacctaacagagaagaaccttccttttgactgagcacttttgatacactctttttgcagaatctgcaagtggatatttggatagctgtgaagatttcgttggaaacgggaatatcttcctataaaatctagacagaagcattctcagaaactgctctgtgatgtctgcattcaagtcacagagttgaacattgcctttcctagagcaggtttgaaacgctctttttgtagtatatggaactggatgtttcggacggtttgaggcccatggtgataaagggaatatcttcccctacaagctagaaagaagcattctgtgaaacttgtttgtgatgtgcgtactcaactaacagagttgaacctttctttttacagagcagttttgaaacactctttttgtagaatctgcgaggggatatttggatacatttcaggatttcgttggaaacgggaatatcttcatataaaatctcgacagaagcattctcagaagcttctttgtgatatgtgcattcaagtcacagagttgaatattccctttcacagagtaggtttgaaacactctttttgtagtatctggaagtggacatttggagcgccttgacgcctacgttgaaaagggaaatatcttctcataaaaagtagacagaagcaatctcagaatcttctttaggatatatgcacgcagctaacagagttgaacctttctattgacagagcagttttgaaacagtctttctgtggaatctgcaagtggatatttggatagcttggaggatttcgttggaaacgggattaagtataaaaagtagacagcagcatactcagaaacttctttgtgatgtgtgcattcaagtcacagagttgaacattccctttcgtacagcagttttgaaacactctttctgtagtatctggaagtgaacattaggacagctttcagctctatggtgagaaaggaaatatcttcaaataaaaactagacagaagcattctcataaacttgtttgtgatgtgtgaactcagctaacagaggtggatctttcttttgatagagcagttctgaaaaacacttttttttgaatctgcaagtggacatttggatagatttgaagatttcgttggaaacgggaatatcttcatatcaaatctagacagaagcattctcagaaacgtctttgtgatgtttgcattcaactcatagagttgaacattccgtttcagagagcaggtttgaaacactctttttgtagtatgtgcaagtggatatttggagcgctccgaggcctacggtgaaaaagcaaatatcttcccataaccactagacagaaaccttctcagaaactcctttatgacgtatgcactcacctaacagaaaagaaccttccttttgacagagcagttttgatacactctttttgtagaatctgcaagtggatatttggatagctgtgaagatttcgttggaaacgggaatatcttcctataaaatctagacagaagcattctcagaaactgctctgtgatgtctgcattcaagtcacagagttgaacattgcctttcatagagcaggtttgaaacgctctttttgtagtatatggaagtagacgtttcggacggtttgagacccatggtgataaagggaatatcttcccctacaagctagaaagaagcattgtgtgaaacttgtttgtgatgtgtgtactcaactaacagagttgaacctttctttttacagagcagttttgaaacactctttttgtagaatctgcgaggggatatttggatagatttcaggatttcgttgtaaacgagaatatcttcatataaaatctcgacagaagcattctcagaaacttccttgtgatatgtgcattcaagtcacagagttgaatattccctttcatagagtaggtttgaaacactctttttgtagtatctggaagtggacatttggagcgcctggacgcctacggtgaaaagggaaatatcttcccataaaaactagacagaagcaatctcagaatcttctttgggatatatgcacgcagctaacagagttgaacctttctattgacagagcagttttgaaacagtctttctgtggaatctgcaagtggatatttggacagcttggaggatttcgttggaaacgggattaagtataaaaagtagacagcagcatcctcagaaacttctttgtgatgtgtgcattcaagtcacagagttgaacattccctttcgtacagcagttttgaaacactctttctgtagtaactggaagtgaacactaggacagctttcaggtctatggtgagaaaggaaatatcttcaaataaaaactagacagaagcattctcataaacttgttttgtgatgtgtgaactcagctaacagaggtggatctttcttttgatagagcagttctgaaaaacactttttgttgaatctgcaagtggacatttggatagatttgaagatttcgttggaaacgggaatatcttcatatcaaatctagacagaagcattctcagaaacgtctttgcgatgtttgcattcaactcatagagttgaacattccgtttcagagagcagctttgaggcactctttttgtagtatgtgcaagtggatatttggagcgccctgaggcctacggtgaaaaagcaaatatcttcccataaccactagacagaaacattctcagaaactcctttatgacctatgcactcacctataagagaagaaccttccttttgacagagcagttttgatacactctttttgtagaatctgcaagtggatatttggatagctgtgaagatttcgttggaaacgggaatatcttcctataaaatctagacagaagcattctcagaaactgctctgtgatatctgcattcaagtcacagagttgaacattgcttttcatagagcaggtttgaaacgctctttttgtagtatatggaagtagacgtttcggacggtttgaggcccatggtgataaagggaatatcttcccctacaagctagaaagaagcattctgtgaaacttgtttgtgatgtgtgtactcaactaacagagttgaacttttcttttcacagagcagttttgaaacactctttttgtagaatctgcgaggggatatttggatagatttcaggatttcgttggaaacgggaatatcttcatataaaatctcgacagaagcattgtcagaaacttctttgtgatatgtgcattcaagtcacagagttgaatattccctttcacagagtaggtttgaaacactctttttgtagtatctggaattggacatttggagcgccttgacacctacggtgaaaagggaaatatcttcccataaaaactagacagaagcaatctcagaatcttctttgggatatatgcacgcagctaacagagttgaacatttctatttacagagcagttttgaaacagtcgttctgtggaatctgcaagtggatatttcgatagcttggaggatttcgttggaaacgggattacgtatcaaaagtacacagcagcatcctcagaaacttctttgtgatgtgtgcattcaagtcacagagttgaacattccctttcgtacagcagttttgaaacactctttctgtagtatctggaagtgaacattaggacagctttcagctctatggtgagaaaggaaatatcttcaaatcaaaactagacagaagcactctcataaacttgtttgtgatgtgtgaactcagctaacagaggtggatctttcttttgatagagcagttctgaaaaacactttttgttgaatctgcaagaggacatttggatagatttgaagatttcgttggaaacgggaatatcttcatatcaaatctagacagaagcattctcagaaacgtctttgcgatgtttgcattcaactcatagagttgaacattccgtttcagagagcagctttgaagcactctttttgtagcatgtgcaagtggatatttggagcgccctgaggcctacggggaaaaagcaaatatcttcccataaccactagacagaaaacattctcagaaactcctttatgacgtatgtactcaactaacagagaagaaccttctttttgactgagcagttttgatacactctttttgtagaatctgcaagtgcatatttggatagctgtgaagatttcgttggaaacgggaatatcttcctataaaatctagacagaagcattctcagaaactgatctgtgatgtctgcattcaagtcacagagttgaacattgcctttcatagagcaggtttgaaacgctctttttgtagtatatggaagtagacgtttcggacggtttgaggcccatggtgataaagggaatatcttcccctgcaagctagaaagaagcattctgtgaaacttgtttgtgatgtgtgtactcaactaacagagttgaacctttccttttacagagcagttttgaaacactctttttgtagaatctgcgaggggatatttggatagatttcaggatttcgttggaaacgggagtatcttcatataaaatctcgacagaagcattttcagaaacttctttgtgatatgtgcattcaagtcacagagttgaatattccctttcacagagtaggtttgaaacactctttttgtagtatctggaagtggacatttggagcgccttgacgcctacggtgaaaagggaaatatcttcccataaaaactagacagaagcaatctcagaatcttttttgggatatatgcacgcagctaacagagttgaacctttctattgacagagcagttttgaaacagtctttctgtggaatctgcaagtggatatttggatagcttggaggatttcgttggaaacgggattacgtataaaaagtagacagcagcatcctcagcaaacttctttgtgatgtgtgcattcaagtcacagagttgaacattccctttcgtacagcagttttgaaacactctttctgtagtatctggaagtgaacattaggacagctttcaggtctatggtgagaaaggaaatatcttcaaataaaaactagacagaagcattctgataaacttgtttgtgaagtgtgatctcagctaacagaggtggatctttcttttgatagagcagttctgaaaaacactttttgttgaatctgcaagtggatatttggatagatttgaagatttcgttggaaacgggaatatcttcatattaaatctagacagaagcattctcagaaacgtctttgtgatgttagcattcaactcatagagttgaacattccctttcagagagcagctttgaagcactctttttgtagtatgtgcaagtggacatttggagcgctttgaggcctacggggaaaaagcaaatatcttcccataaccactagacaggaacattctcagaaactcctttatgacgtatgcactcacctaacagagaagaaccttccttttgacagagcagttttgagatactctttttgtagaatctgcaagtggatattgggatagctgtgaagatttcgttggaaacgggaatatcttcctataaaatctagacagaagcattctcagaaactgctctgtgatgtctgcattcaagtcatagagttgaacattgcctttcatagagcaggtttgaaacgctctttttgtagtatatggaagtggacgtttcggacggtttgaggcccatggtgataaagggaatatcttcccctacaagctagaaagaagcattgtgtgaaacttatttgtgatgtgtgtactcaactaacagagttgaacctttctttttacagagcagttttgaaacactctttttgtagaatctgcgaggggatatttggatagatttcagcatttcgttggaaacgggaatatcttcatataaaatactcgacagaagcattctcagaaacttccttgtgatatgtgcattcaagtcacagagttgaatattccctttcacagagtaggtttgaaacagtctttttgtagtatctggaagtggacatttggagcgccttgatgcctacggtgaaaagggaaatatcttcccataaaaactagacagaagcaatctcagaatcttctttgggatatatgcacgcagctaacagagttgaacctttctattgacagagcagttttgaaacagtctttctggggaatctgcaagtggatatttggatagcttggaggatttcgttggaaacaggattacgtataaaaagtagacagcagcatcctcaggaaacttctttgtgatgtgtgcattcaagtgacagagttgaacattccctttcgtacagcagttttgaaacactctttctgtagtatctggaagtgaacattaggacagctttcagctctatggtgagaaaggaaatatcttcaaataaaaactagacagaagtattctcataaacttgtttgtgatgtgtgaactcagctaacagaggtggacctttcttttgatagagcagttctgaaaaacactttttgttgaatctgcaagtggacatttggatagatttgaagatttcgttggaaacgggaatatcttcatatcaaatctagacagaagcattctcggaaacgtctttgtcatgtttgcattcaactcatagagttgaacattccctttcagagagcagctttgaagcactctttttgtagtatgtgcaaggggatatttggagtgctctgaggcctacggtgaaaaagcaaatatcttcccataaacactagacagaaacattctcagaaactcctttatgacgtatgcactcacctaacagagaagaaccttccttttgacagagcagttttgatacactctttttgtagaatctgcaagtggatatttggatacctgtgaagatttcgatgtaaacgggaatatcttcctataaaatctagacagaagcattctcagaaactgctctgtgatgtctgctttcaagtcacagagttgaacattgcctttcatagagcaggtttgaaacgctctttttgtagtatatggaagtggacttttcggacggtttgaggcccatggtgataaagggaatatcttcccctacaagctagaaagaagcattctgtgaaacttgtttgtgatgtgtgtactcaactaacagagttgaacctttctttttacagagcagttttgaaacactctttttgtagaatctgcgaggggatatttggatagatttcaggatttcgttggaaacgggaatatcttcatataaaatcgcgacagaagcattcttagaaactttttgtgatacctacattcaaatcaaagagttgaatattccctttcacacagtaggtttgaaacactctttttgtagtatctggaagtggacatttggagcgccttgacgcctacggtgaaaaaggaaatatgttcccataaaaactagacagcagcaatctcagaatcttctttgggatatatgtacgcagctaacagagttgaacttttctattgacagagcagttttgaaacagtctttctgttaaatctgcaagtggatatttggatagcttggaggatttcgttggaaacgggattacatataaaaagtagacagcagcatcctcagaaacttctttgtgatgtgtgcattcaagtcacacagttgaacattccctttcgtacagcagttttgaaacactctttctgtagtatctggaagtgaacattaggacagctttcagctctatggtgagaaaggaaatatcttcaaataaaaactagacagaagcattctcataaacttgtttgtgatgtgtgaactcagctaacagaggtggatctttcttttgatagagcagttctgaaaaacactttttgttgaatatgcaagtggacatttggatagatttgaagatttcgttggaaacgggaatatcttcatatcaaatctagacagaagcattcccagaaacgtctttgtgatgtctgcattcaactcatagagttgaacattccctttcagagagcagctttgaagcactctttttgtagtatgtgcaaggggataattggagtgctctgaggcctagggtgaaaaagcaaacatcttcccataaccactagacagaaacattctcagaaactcctttatgacgtatgcactcacctaacagagaagaaccttccttttgacagagcagttttgatacactctttttgtagaatctgcaagtggatatttggatagctgtgaagatttcgttggaaacgggaatatcttcctataaaatctagacagaagcattctcagaaactgctctgtgttgtctgcattcaagtcacagagttgaacattgcctttcatagagcaggtttgaaacactctttttgtagtatatggaagtggacgtttcggacggtttgaggcccatggtgatttagggaatatcttcccctacaagctagaaagaagcattctgtgaaactagtttgtgatgtgtgtactcaactaacagtagttgaacctttcttttcacaggagcagttttgaaacactctttttgtagaatctgcgaggggatatttggatagatttcagcatttcgttggaaacgggaatatcttcatataaaatctcgacagaagcattctccgaaacttccttgtgatatgtgcattcaagtcacagagttgaatattccctttcacagagtaggtttgaaacactctttttgtagtatctggaagtggacatttggagcgccttgacgcctacggtgaaaagggaaatatcttcccataaaaactagacagaagcaatctcagaatcttctttgggatatatgcacgcagctaacagacttgaatctttctgttgacagagcagatttgaaacagtctttctgtggaatctgcaagtggatatttggatagattggaggatttcgttggaaacgggattacatataaaaagtagacagcagcatcctccgaaacttctttgtgatgtgtgcattcaagtcacagagttgaacattccctttcgtacagcagttttgaaacactctttctgtagtatctggaagtgaacattaggacagcgttcagctctatggtgagaaaggaaatatcttcaaataaaaactagacagaagcattctcataaacttgtttgtgatgtgtgaactcagctaacagaggtggatctttcttttgatagagcagttctgaaaaacactttttgttgaatctgcaagtggacatttggatagatttgaagatttcgttggaaacgggaatacctttatatcaaatctagacagaagcattctcagaaacgtctttgtcatgtttgcattcaactcatagagttgaacattccctttcagagagcagctttgaaagactctttttgtagtatgtgcaagtggatatttggagcgctactgaggcctacggtgaaaaagcaaatatcttcccataaccactagacagaaacattctcagaaactcctttatgacgtatgtactcaactaacagagaagaacattctttttgacagagcagttttgatacactctttttgtagaatctgcaagtgcatatttggatagctgtgaagatttcgttggaaacgggaatatcttcctataaaatctagacagaagcattctcagaaactgctctgtgatgtctgcattcaagtcacagagttgaacattgcctttcatagagcaggtttgaaacgctctttttgtagtatatggaagtggacgttttggacggtttgaggcccatggtgataaagggaatatcttcccctacaagctagaaagaagcattctgtgaaacttgtttgtgatgtgtgtactcaactaacagagttgaacctttcttttcacagagcagttttgaaacactctttttgtagaatctgcgaggggatatttggatagatttcaggatttcgttggaaacgggaataccttcatataaaatctcgacagaagcattctcagaaagttctttgtgatatgtgcattgaagtcacagagttgaatattccctttcacagagtaggtttgaaacactctttttgtagtatctggaagtggacatttggagcgccttgacacctacggtgaaaagggaaatatcttcccataaaaactagacagaagcaatctcagaatcttctttgggatatatgcacgcagctaacagagttgaacctttctattgacagagcagttttgaaatagtctttctgtggaatctgcaagtggatatttggatagcttggaggatttcgttggaaacgggattaggtataaaagtagacagcagcctcctctgaaacttctttgtgatgtgtgcattcaagtcacagagttgaacattccctttcgtacagcagttttgaaacactctttctgtagtatctggaagtgaacattaggacagctttcaggtctatggtgagaaaggaaatatcttcaaataaaaactagacagaagcattctcataaacttgtttgtgatgtgtgaactcagctaacagaggtggatctttcttttgatagagcagttctgaaaaacactttttgttgaatctgcaagtggacatttggatagatttgaagatttcgttgtaaacgggaatatcttcatatcaaatctagacagaagcattcccagaaacgtctttgtgatgtttgcattcaactcatagagttgaacattccgtttcagagagcagctttgaagcactctttttgtagtatgtgcaagtggatatttggagcgctctgaggcctacggtgaaaaagcaagtatcttcccataaccactagacagaaacattctcagaaactcctttatgacgtatgtactcaactaacagagaagaaccttccttttgacagagcagttttgacacactctttttgtagaatctgcaagtggatatttggatagctgtgaagatttcgttggaaacgggaatatcttcctataaattctagacagaagcattctcagaaactgctctgtgatgtctgcattcaagtcacagagttgaacattgcctttcatagagcaggtttgaaacgctctttttgtagtatatggaagtggatgtttcggacagttggaggcccatggtgataaagggaatatcttcccctgcaagctagaaagaagcattctgtgaaacttgtttgtgatgtgtgtactcaactaacagagttgaacctttctttttacacagcagttttgaaacactctttttgtagaatctgcgaggggatatttggatagatttcaggatttcgttggaaacgggaataccttcatataaaatctcgacagaagcattctcagaaacttctttgtgatatgtgcattcaagtcacagagttgaatattccctttcacagagtaggtttgaaacactctttttgtagtatctggaagtggacatttggagcgccttgacacctacggtgaaaagcgaaatatcttcccacaaaaactagacagaagcaatctcagaatcttctttgggatatatgcacgcagctaacagagttgaacctttctattgacagagcagttttgaaacagtctttctgtggaatctgcaagtggatatttggaaagcttggaggatttcgttggaaacgggattaagtataaaaagtagacagcagcatcctcagaaacttctttgtgatgtgtgcattcaagtcacagagttgaacattccctttcgtacaacagttttgaagcactctttctgtagtatctggaagtgaacattaggacagctttcaggtctatggtgagaaaggaaatatcttcaaataaaaactagacagaagcattctcataaacttgtttatgatgtgtgaactcagctaacagaggtggatctttcttttgatagagcagttctgaaaaacactttttgttgaatctgcaagtggacatttggatagatttgaagatttcgttggaaacgggaatattttcatatcaaatctagacagaagcattctcagaaacgtctttgcgatgtttgcattcaactcatagagttgaacattccgtttcagagagcagctttgaagcactctttttgtagtatgtgcaagtggatatttggagcgctctgaggcctacggggaaaaagcaaatatcttcccataaccactagacagaaacattctcagaaactcctttatgacgtatgcactcacctaacagagaagaaccttccttttgacagagcagttttgatacactctttttgtagaatctgcaagtggatatttggatagccgtgaagatttcgttggaaacgggaatatcttcctataaaatctagacagaagcattctcagaaactgctctgtgatgtctgcattcaagtcacagagttgaacattgcctttcatagagcaggtttgaaacgctctttttgtagtatatggaagtggatgtttcggacggttggaggcccatggtgataaggggaatatcttcccctacaagctagaaagaaagcattctgtgaaacttgtttgtgatgtgtgtactcaactaacagagttgaacctttctttttacagagcagttttgaaacactctttttgtagaatctgcgaggggatatttggatagatttcaggatttcgttggaaacgggaatatcttcatataaaatctcgacagagcattctctgaaacttctttttgatatgtgcattcaagtcacagagttcaatattccctttcacagagtaggtttgaaacactctttttgtagtatctgaagtggacatttggagcgccttgacgcctacggtgaaaagggaaatatcttctcataaaaagtagacagaagcaatctcagaatcttctttgggatatatgcacgcagctaacagagttgaacctttctattgacagagcagttttgaaacagtctttctgtggaatctgcaagtggatatttggatagcttgaaggatttcgttggaaacgggattacgtataaaaagtagacagcagcatcctcagaaacttctttgtgatgtgtgcattcaagtcacagagttgaacattccctttcgtacagcagttttgaaacactttctgtagtatctggaagtgaacattaggacagctttcaggtctatggtgagaaaggaaatatcttcaaataaaaactagacagaagcattctgataaacttgtttgtgaagtgtgaactcagctaacagtggtggatctttcttttgatacagcagttttgaaaaacactttgttgaatctgcaagtggacatttggatagatttgaagatttcgttggaaacgggaatatcttcatatcaaatctagacagaagcattctcggaaacgtctttgtgatgtttgcattcaactcatagagttgaacattccgtttcagagagcagctttgaggcactcattttgtagtatgtgcaagttgatatttggagcgctctgaggccttcggtgaaaaagcaaatatcttcccataaccactagacagaaacgttctcagaaactcctttatgacgtatgcactcacctaacagagaagaaccttccttttgacagagcagttttgatacactctttttgtagaatctgcaagtggatattgggatagctgtgaagatttcgttggaaacgggaatatcttcctataaaatctagacagaagcattctcagaaactgctatgtgatgtctgcattcaagtcacagagttgaacattgcctttcctagagcaggtttgaaacgctctttttgtagtatatggaagtggaagtttcggacggtttgaggcacatggtgataaagggaatatcttcccctacaagctagaaagaagcattctgtgaaacttttttgtgatgtgtgtactcaactaacagagttgaaccattctttttacagagcagttttgaaacactctttttgtagaatctgcgtggggatatttggatagatttcaggatttcgttggaaacgggattatcttcatataaaatctcgacagaagcattctcagaaacttctttgtgatatgtgtattcaagtcacagagttgaatactccctttcacagagtaggtttgaaacactctttttgtagtatctggaagtggacatttggagcgccttgacgcctacggtgaaaagggaaatatcttcccataaaaactagacagaagtaatctcagaatcttctttgggatatatgcacgcagctaacagagttgaatctttctattgacagagcagttttgaaacagtctttctgtggaatctgcaagtggatatttggatagcttggaggatttcgttggaaacgggattacgtataaaaagtagacagcagcatcctcagaaacttctttgtgatgtgtgcattcaactcacagagttgaacattccctttcgtacagcagttttgaaacactctttctgtagtaactggaagtgaacattaggacagctttcaggtctatggtgagaaaggaaatatcttcaaataaaaactagacagaagcattttcataaacttgtttgtgatgtgtgaactcagctaacagaggtggatctttcttttgatagagcagttctgaaaaacactttttgttgaatctgcaagtggacatttggatagatttgaagatttcgttggaaacgggaataacttcatatcaaatctagacagaagcattctcagaaacgtctttgtgatgtttgcattcaactcatagagttgaacattcactttcagagagcagctttgaagcactctttttgtagtatgtgcaagtggatgttttgatcgctctgtggcctacggtgaaaaagcaaatatcttcccataaccactagacagaaacattctcagaaactcctttatgacgtatgcactcacctaacagagaagaaccttccttttgacagagcagttttgatacactctttttgtagaatctgcaagtggatatttggatagctgtgaagatttcgttggaacgggaatatcttcctataaaatctagacagaagcattctcagaaactgctctgtgatgtctgcattcaagtcacagagttgaacattgcctttcatagagcaggtttgaaatgctctttttgcagtatatggaagtggacgtttcagacggtttgaggcccatggtgataaagggaatatcttcccctacaagctagaaagaagcattctgtgaaacttgtttgtgatgtgtgtactcaactaacagagttgaacctttctttttacagagcacttttgaaacactctttttgtagaatctgcgaggggatatttggatagatttcaggatttggttggaaactggaatatcttcatataaaatctcgacagaagcattctcagaaacttctttgtgatatctgcctttaagtcacagagttgaatattccctttcacagagtaggtttgaaacactctttttgtagtatctggaagtgaacatttggagcgccttgacacctacggtgaaaagggaaatatcttcccataaaaactagacagaagcaatctcagaatcttctttgggatatatgcacgcagctaacagagttgaacctttctattgacagagcagttttgaaacagtctttctatggattctgcaagtggatatttggatagcttggaggatttcgttggaaacgggattacgtataataagtagacagcagcatcctcagaaacttctttctgatgtgtgcattcaagtcacagagttgaacattccctttcgtacagcagttttgaaacactctttctgtagtatctggaagtgaacattaggacagctttcaggtctatggtgagaaaggaaatatcttcaaataaaaattagacagaagcattctcaaaaacatgtttgcgatgtctgaactcagctaacagaggtggatctttcttttgatagagcagttctgaaaaacactttttgttgaatctgcaagtggacatttggatagatttgaagatttcgttggaaacgggaatatcttcatatcaaatctagacagaagcattctcagaaacgtctttgcgatgtttgcattcaactcatagagttgaacattccctttgagagagcagctttgaagcactctttttgtagcatgtgcaagtggacatttggagcgccctgaggcctacggggaaaaagcaaatatcttcccataaccactagacagaaacattctcagaaactcctttatgacgtatgcactcacctaacagagaagaaccttccttttgagagagcagttttgatacactctttttgtagaatctgcaagtggatatttggatagctgtgaagatttcgttggaaacgggaatatcttcctataaaatctagacagaagcattctcagaaactgctctgtgatgtctgcattcaagtcacagagttgaacattgcctttcctggagcaggtttgaaacgctctttttgtagtatatggaagtggacgtttcggacggtttgaggcccatggtgataaagggaatatcttcccctacaagctagaaagaagcattctgtgaaacttgtttgtgatgtgtgtactcaactaacagagttgaacctttctttttaaagagcagttttgaaacactctttttgtagaatctgcgaggggatatttggagagatttcaggatttcgttggaaacgggaatatcttcatataaaatctcgacagaagcattctcagaaacttcattgtgatatctgcattcaagtcacagagcggaatattccctttcagagagtaggtttgaaacactctttttgtagtatctggaagtggacatttggagcgccttgacacctacggtgaaaagggaaatatcttcccatgaaaactagacagaagcaatctcagaattttctttgggatatatgcacacagctaacagagttgaacttttctattgaaatagcagttttgaaacagtctttctgtggaatctgcaagtggatatttggatagcttggaggatttcgttggaaacgggattacgtataaaaagtagacaacagcatcctcagaaacatccttgtgatgtgtgcattcaagtcacagagttgaacattccctttcgtacagcagttttgaaacactctttctgtagtatctggaagtgaactttaggacagctttcaggtctatagtgagaaaggatatatcttcaaataaaaactagacagaagcattctcataaacttgttcgtgatgtgtgaactcagctaagagccgtggatctttcttttgatagagcagttctgaaaaacactttttgttgaatctgcaagtggacatttggatagatttgaagatttctttggaaacgggaatatcttcatatcaaatctagacagaagcattctcagaaacgtctttgtgatgtttgcattcaactcatagagttgaacattccctttcagagagcagttttgaagcactctttttgtagtaagtgcaaattgacatttggagcgctttgaggcctaaggggaaaaagcaaatatcttcccataaccactagacagaaacattctcagaaactcctttatgacgtatgcactcacctaacagagaagaaccttccatttgacagagcagttttgatacactctttttgtagaatctgcaagtggatatttggatagctgtgaagatttcgttggaaacgggaatatcttcctataaaatctagacagaagcattctcagaaactgctctgtgatgtctgcattcaagtcacagagttgaacattgcttttccaagaacaggtttgaaacgctctttttgtagtatatggaagtggacgtttcggacggtttgaggcccatggtgataaagtgaatatcttcccctacaagctagaaagaaagcattctgtgaaacttatttgtgatgtgtgtactcaactaacagagttgaacctttctttttacagagcagttttgaaacactctttttgtagaatctgcgaggggatatttggatagatttcaggatttctttggaaacgggaatatcttcatataaaatctcgacagaagcattctcagaaacttctttgtgatatgtgcattcaagtcacagagttgaatattccctttcaccgagtaggtttgaaacactctttttgtagtatctggaagtggacatttggagcgccttgacgcctacggtgaaaagggaaatatcttcccataaaaactagacagaagcaatctcagaatcttctttgggatatatgcacgaagctaacagagttgaacctttctattgacagagcagttttgaaacagtctttctgtggaatctgcaagtggatatttggatagcttggaggatttcaatggaaacgggattacgtataaaaagtagacagcagcatcctcagaaacttctttgtgatgtgtgcattcaagtcacagagttgaacattccctttcgtacagcagttttgaaacactctttctgtagcatctggaagtgaacattaggacagctttcaggtctatggtgagaaaggaaatatcttcaaataaaaactagacagacaagcattctcataaacttgtttgtgatgtgtgaactcagctaacagacgtggatctttcttttgatacagcagttttgaaaaacactttttgttgaatctgcaagtggacatttggatagatttgaagatttcgttggaaacgggaatatcttcatatcaaatctagacagaagcattctcagaaacgtctttgtgatgtttgcattcaactcatagagttgaacattccgtttcagagagcagctttgaagcactctttttgtagtatgtgcaagtggatatttggatcgctctgaggcctacggtgaaaaagcaaatatcttcccgtaaccactaaacagaaacattctcagaaactcctttatgacgtatgtacgcaactaacagagaagaaccttctttttgacagagcagttttgatacactctttttgtagaatctccaagtggatatttggatagctgtgaagatttcgttggaaacgggaatatcttcctataaaatctagacagaagcattctcagaaactgctctgtgatgtctgcattcaagtcacagagttgaacattgcctttcatagagcaggtttgaaacgctctttttgtagtatatggaagtggacttatcggacggtttgaggcccatggttataaagggaatatcttcccctacaagctagaaagaagcattctgtgaaacttgtttgtgatgtgtgtactcaactaacagagttgaacctttcttttcacagagcagttttgaaacactctttttgtagaatctgcgaggggatatttggatagatttcaggatttggttggaaacgggaatatcttcatataaaatctcgacagaagcattctcagaaacttctttgtgatatgtgcattcaagtctcagtgttgaatattccctttcacagagtaggtttgaaacactctttttgttgtatctggaagtggacatttggagcgccttgacacctacgatgaaaagggaaatatcttcccataaaaactagacagaagcaatctcagaatcttctttgggatatatgcaggcagctaacagagttgaacatttgtattgacagagcagttttgaaacagtctttctgtggaatctgcaagtggatatttggatagcttggaagttttctttggaaacgggattacgtaaaaaaagtagactgcagcatcctcagaaacatccttgtgatgtgtgcattcaagtcacagagttgaacattccctttcgtacagcagttttgaaacactctttctgtagtatctggaagtgaactttaggacagctttcaggtctatagtgagaaaggatatattttcaaataaaaactagacggaagcattctgataaacttgtttgtgaagtgtgatctcagctaacagaggtggatctttctttgaatagagcagttctgaaaaacactttgttgaatctggaagtggacatttggatagatttcaagatttcgttggaaacgggaatatcttcatatcaaatctagacagaagcattctcagaaacgtctttgcgatgtttgcattcaactcatagagttgaacattccctttcagagagcagctttgaagcactctttttgtagtatgtgcaagttgacatttggagcgctttgaggcctacggggaaaaagcaaatatcttcccataaccactagacagaatcattctcagaaactcctttatgacgtatgcactcacctaacagagaagaaccttccttttgacagagcagttttgatacactctttttgtagaatctgcaagtggatattgggatagctgtgaagatttcgttggaaacgggaatatcttcctataaaatctagacagaagcattctcagaaacagctctgtgatgtctgcattcaagtcacagagttgaacattgcctttcatagagcaggtttgaaacgctctttttgtagtatatggaagtggacgtttcggacggtttgaggcccatggtgataaagggaataacttcccctacaagctagaaagaagcattctgtgaaacttgtttgtgatgtgtgtactcaactaacagagttgaacctttcttttcacagagcagttttgaaacactctttttgtagaatctgcgaggggatatttggatagatttcaggatttcgttggaaacgggaatatcttcatataaaatctctacagaagcattctcagaaacttctttgtgatatgtgcattcaagtcacagagttgaatattccctttcacagtgtaggtttgaaacactctttttgtagtatctggatgtggacatttggagcgccttgacgcctacggtgaaaagggaaatatcttcccataaaaactagacagaagcaatctcagaatcttctttgggatatatgcacgcagctaacagagttgaacatttctattgacagagcagttttgaaacagtcgttctgtggaatctgcaagtggatatttcgatagcttggaggatttcgttggaaacgggattacgtatcaaaagtacacagcagcatcctcagaaacttctttgtgatgtgtgcattcaagtgacagagttgaacattccctttcgtacagcagttttgaaacactctttctgtagtatctggaagtgaacattaggacagctttcagctctatggtgagaaaggaaatatcttcaaataaaaactagacagaagcattctcataaacttgtttgtgatgtgtgaactcagctaacagaggtggatctttctcttgatagagcagttctgaaaaacactttttgttgaatctgcaagtggacatttggatagatttgaagatttcgttggaaacgggaatatcttcatatcaaatctagacagaagcattctcagaaacgtctttgtgatgtttgcattcaactcatagagttgaacattccgtttcatagagcagctttgaggcactctttttgtagtatgtgcaagtggatatttggagcgctctgaggcctacggtgaaaaagcaaatatcttcccataaccactagacagaaacattctcagaaactcctttatgacgtatgcactcacctaacagagaagaaccttccttttgacagaacagttttgatacactctttttgtagaatctgcaagtggatatttggatagctgtgaagatttcgttggaaacgggaatatcttcctataaaatctagacagaagcattctcagaaactgctctgtgatgtctgtattcaagtcacagagttgaacattgcctttcatagagcaggtttgaaacgctcttgttgtagtatatggaagtggatgtttcggacggttggaggcccatggtgataaagggaatatcttcccctacaagctagaaagaaagcattctgtgaaacttgtttgtgatgtgtgtactcaactaacagagttgaacctttctttttacagagcaattttgaaacactctttttgtagaatctgcgaagggatatttggatagatttcaggatttcgttggaaacgggagtatcttcatataaaatctcgacagaagcattctcagaaacttctttgtgatatctgcctttaagtcacagagttgaatattccctttcacagagtaggtttgaagcactctttttgtagtatctggaagtggacatttggagcgccttgacacctacggtgaaaagggaaatatcttcccataaaaactagacagaagcaatctcagaatcttctttgggatatatgcacgcagctaacagagttgaacctttctattgacagagcagttttgaaacagtctttctgtggaatctgcaagtggatatttggatagcttggaggatttcgttggaaacgggattacgtataaaaagtagatagcagcatcctcagaaatttctttgtgatgtgtgcattcaagtcacagatttgaacattccctttcatacagcagttttgaaacactctttctgtagtatctggaagtgaacattaggacagctttcaggtctatggtgagaaaggaaatatcttcaaataaaaactagacagaagcattttcataaacttgtttgtgatgtgtgaactcagctaacagaggtgaatctttcttttgatagagcatcagctaacagacgtggatctttcttttgatacagcagttttgaaaaacactttttgttgaatctgcaagtggacatttggatagatatgaagatttcgttggaaacgggaatatcttcatatcaaatctagacagaagcattctcagaaacgtctttgtgatgtttgcattcaactcatagagttgaacattccgtttcagagagcagctttgaggcactctttttgtagtatgtgcaagtggatatttggagcgctctgaggcctacggtgaaaaagccaatatcttcccataaccactagacagaaacattctcagaaactcctttatgacgtatgcactcacctaacagagaagaaccttccttttgacggagcagttttgatacactctttttgcagaatctgcaagtggatatttggatagctgtgaagatttcgttggaaacgggaatatcttcctataaaatctagatggaagcattctcagaaactgctctgtgatgtctgcattcaagtcacagagttgaacattgcctttcctagaacaggtttgaaacgctctttttgtagtacatggaagtggacgtttcggacggtttgaggcccatggtgataaagggaatatcttcccctacaagctagaaagaagcattctgtgaaacttgtttgtgatgtgtgtactcaaactaacagagttgaacctttctttttacagagcagttttgaaacactctttttgtagaatctgcgaggggatatttggatagatttcaggatttcgttggaaaggggaatatcttcatataaaatctcgacagaagcattctcagaaacttctttgtgatatgtgcattcaagtcacagagttgaatattccctttcacagagttggtttgaaacactctttttgtagtatctggaagtggacatttggagcgccttgacacctacggtgaaaagggaaatatcttcccataaaaactagacagaaacaatctcagaatcttctttgggatatatgcacgcagctaacagagttgaacctttctattgacagagcagttttgaaacagtctttctgtggaatctgcaagtggatatttggatagcttggaggatttcgttggaaacgggattacgtataaaaagtagacagcagcatcctcagaaacttctttgtgatgtgtgcattcaagtcacagagttgaacaatccctttcgtacagcagttttgaaatactctttctgtagtaactggaagtgaacattaggaaagctttcaggtctatggtgagaaaggaaatatcttcaaataaaaactagacagaagcattctcataaacttgtttgtgatgtctgaactcagctaacagaggtggatctttcttttgatagagcagttctgaaaaacactttttgttgaatctgcaagtggacatttggatagatttgaagatttcgttggaaacgggaatatcttcatatcaaatctagacagaagcattctcagaaacgtctttgtgatgtttgcattcaactcatagagttgaacattccctttcagagagcagctttgaagcactctttttgtagtatgtgcaagtggatatttggagcgctctgaggcctacggtgaaaaagcaaatatcatcccataaccactagacggaaacattctcagaaactcctttatgacctatgcactcacctaaaagagaagaaccttccttttgacagagcagttttgatacactctttttgtagaatctgcaagtggatatttggatagctgtgaagatttcgttggaaacgggaatatcttcctataaaatctagacagaagcattctcagaaactgctctgtgatgtctgcattcaagtcacagagttgaacattgcctttcatagagcacgtttgaaacgctctttttgtagtatatggaagtagacgtttcggacggtttgaggcccatagtgataaagggaatatcttcccctacaagatagaaagaagcattctgtgaaacttctttgtgatgtgtgtactcaactaacagagttgaacctttctttttacagagcagttttgaaacactctttttgtagaatctgcgaggggatatttggatagatttcaggatttcgttggaaacgggaatatcttcatataaaatctcgacagaagcattctcagaaacttctttgtgatatctgcattcaagtcacagagttgaatattccctttcacagagtaggtttgaaacactctttttgtaatatctggaagtggacatttggagcgccttgacgcctacggtgaaaagggaaatatcttcccataaaaactagacagaagcaatctcagaatcttctttgggatatatgcacgcagctaacagagttgaacctttctattgacagagcagttttgaaacagtctttctgtggaatctgcaagtggatatttggatagcttggaggatttcgttggaaacgggattacgcataaaaagtagacagcagcatcctcagaaacttctttgtgatgtgtgcattcaagtcacagagttgaacattccctttcgtacagcagttttgaaacactctttctgtagtatctggaagtgaacattaggacagctttcaggtctatggtgagaaaggaaatatcttcaaataaaaactatacagaagcattctcataaacttgtttgtgatgtgtgaactcagctaagagacgtggatctttcttttgatagagcagttctgaaaaacacgttttgttgaatctgcaagtggacatttggatagatttgaagatttcgtgggaacgggaatatcttcatatcaaatctagacagaagcattctcagaaacgtctttgtgatgtttgcattcaacccatagagttgaacattccgtttcagagagcagctttgaagcgctctttttgtagtatgtgcaaggggatatttggagcgctctgaggcctaaggtgaaaaagcaaatatcttcccataaccactagacagaaacattctcagaaacttctttatgacgtatgtactcaactagcagagaagaactttccttttgacagagcatttttgatacactctttttgtactatctgcaagtggatatttgtatagctgtgaagatttcgttggaaacgggaatatcttcctataaagtctggacagaagcattctcagaaactgctctgtgatgtctgcattcaagtcacagagttgaacattgcctttcatagagcaggtttcaaacactgtttttttagtatatggaagtggacgttttggacggtttgaggcccatggtgataaaggaaatatcttcccctacaagctagaaagaagcattctgtgaaacttgtttgtgatgtgtgtactcaactaacagagttgaacctttctttttacagagcagttttgaaacactctttttgtagaatctgcgagggcatatttggatagatttcaggatttcgttggaaacgggaatatctacatataaaatctcgacagaagcattctcagaaacttctttgtgatatctgccttcaagtcacagagttgaatattccctttcacagagtaggtttgaaacactctttttgtagtatctggaagtggacatttggagcgccttgacgcctaaggtgaaaagggaaatatcttcccataaaaactagacagaagcaatctcacaatcttctttgggatatatgcacgcagctaacagagttgaacctttctattgacagagcagttttgaaacagtctttctgtggaatctgcaagtggatatttggatagcttggaggatttcgttggaaacgggattacgtataaaaagtagacagcagcatcgtcagaaactactttgtgatgtgtgcattcaagtcacagagttgaacattccctttcgtacagcagttttgaaacactctttctgtagtatctggaagtgaacattaggacagcttgcaggtctatggtgagaagggaaatatcttcaaataaaaactagacagaagcattctcataaacttgtttgtgatgtgtgaactcagctaaccgagatggatctttcttttgatagagcagttctgaaaaacactttttgttgaatctgcaagtggacatttggatagatttgaagatttcgttggaaacgggaatatcttcatatcaaatctagacagaagcattctcggaaacgtctttgtgatgtttgcattcaactcatagagttgaacattccgtttcagagagcagctttgaggcactcattttgtagtatgtgcaagtggatatttggagcgctctgaggccttcggtgaaaaagcaaatatcttcccataaccactagacagaaacattctcagaaacttctttatgacgtatgtactcaactagcagagaagaactttccttttgacagagcagttttgatacactctttttgtagaatctgcaagtggatatttggatatctgtgaagatttcgctggaaacgggaatatcttcctataaaatctagacagaagcattctcagaaactgctctgtgatgtctgcattcaagtcacggagttgaacattgcctttcatagagcaggtttgaaacgctctttttgtagtatatggaagtggacgtttcggacggtttgaggcccatggtgataaagggaatatcttcccctacaagctagaaagaagcattctgtgaaacttgtttgtgatgtgtgtactcaactaacaatagttgaacctttctttttacagagcagttttgaaacactctttttgtagaatctgcgaggggatatttggatacatttcagcatttcgttggaaacgggaatatcttcatataaaatctcgacagaagcattctcagaaacttctttgggatatctgcattcaagtcacagagttgaatattccctttcacagagtaggtttgaaacactctttttgtagtatctggaagtggacatttggagcgcattgacgcctacagtgaaaaaggaaatatcttcccataaaaactagacagaagcaatctcagaatcttctttgggatatatgcacgcagctaacagagttgaacctttctattgacagagcagttttgaaacagtctttctctggaatctgcaagtggatatttggatagcttggaggatttcgttggaaacaggattacgtataaaaagtagacagcagcattctcagaaaattctttgtgatgtgtgcattcaagtcacagagttgaacattccctttcgtacagcagttttgaaacactctttctgtagtatctggaagtgaacattaggagagcttccaggtctatggtgagaaaggatatatcttcaaataaaaactagacagaagcattctcataaacttgtttgtgatgtgtgaactcagctaacagacgtggatctttcctttgatacagcagttttgaaaaacactttttgttgaatctgcaagtggacatttggatagatttgaagatttcgttggaaacgggaatatcttcatatcaaatctagacagaagcattctcagaaacgtctttctgatgtttgcattcaactcatagagttgaacattccctttcagagagcagctttgaagcactctttttgtagtatgtgcaaggggatatttggagcgctctgaggcctacggtgaaaaagcaaatatcttcccataaccactagacagaaacattctcagaaactcctgtatgacgtatgcactcacctaacagagaagaaccttccttttgacagagcagttttgatacactctttttgtagaatatgcaagtggatatttggatagctgtgaagatttctttggaaacgggaatatcttcctataaaatctagacagaagcattctcagaaactgctctttgatgtctgcattcaagtcacagagttgaacattgcctttcatagagcaggtttgaaacgctctttttgtagtatatggaagtggatgtttcggacggttggaggcccatggtgataaagggaatatcttcccctacaagctagaaagaagcattgtgtgaaacttgtttgtgatgtgtgtactcaactaacagagttgaacctttctttttacagagcagttttgaaacactctttttgtagaatctgcgaggggatatttggatacatttcaggatttcgttggaaacgggaataccttcatataaaatctcgacagaagcattctcagaaacttctttgtgatatctgccttcaagtcacagagttgaatattccctttcacagagtaggtttgaaacactctttttgtagtatctggaagtggacatttggagcgccttgacgcctacggtgaaaagggaaatatcttcccataaaaactagacagaagcaatctcagaatcttctttgggatatatgcacgcagctaacaaagttgaacctttctattgacagagcagttttgaaacagtctttctgtggaatctgcaagtggatatttggatagcttggaggatttcgttggaaacgggattacgtataaaaagtagacagcagcatcctcagaaacttctttgtgatgtgtgcattcaagtcacagagttgaacattccctttcgtacagcagttttgaaacactctttctgtactatctggaagtgaacattaggacagctttcagctctatggtgagaaaggaaatatcttcaaataaaaactagacagaagcattctgataaacttgtttgtgaagtgtgatctcagctaacagaggtggatctttcttttgatagagcagttctgaaaaacactttgttgaatctgcaagtggacatttggatagatttgaagatttcgttggaaacgggaatatcttcatatcaaatctagacagaagtattctcagaaacgtctttgtgatgtttgcattcaactcatagagttgaacattccctttcagagagcagctttgaagcactctttttgtagtatgtgcaagtggatatttggagcgctctgaggcctacggtgaaaaagcaaatatcttcccataaccactagacagaaacattctcagaaactcctttatgacgtatgcactcacctaacagaaaagaaccttccttttgacagagcagttttgatacactctttttgtagaatctacaagtggatatttggatagctgtgaagatttcgttggaaacgggaatatcttcctttaaaatctagacagaagcattctcagaaactgctctgtgatgtctgtattcaagtcacagagttgaacattgcctttcatagagcaggtttgaaacgctctttttgtagtatatggaagtggatgtttcggacggttggaggcccatggtgataaacggaatatcttcccctacaagctagaaagaagcattctgtgaaacttgtttgtgatgtgtgtactcaactaacagagttgaacatttctttttacagagcagttttgaaacactctttttgtagaatctgcgaggggatattaggatagatttcaggatttcgttggaaacgggaatatcttcatataaaatctcgacagaagcattctcagaaacttctttgtgatatgtgcattcaagtcacagagttgaatattccctttcacagagtaggtttgaaacactctttttgtagtatctggaagtggacatttggagcgccttgacacctacggtcaaaagggaaatatcttcccataaaaactagacagaagcaatctcagaatcttctttgggatatatgcacacagctaacagagttgaacctttctattgacagagcagttttgaaacagtctttctgtggaatctgcaagtggatatttggatagcttggaggatttcgttggaaacgggattaagtataaaaagtagacagcagcatcctcagaaacttctttgtgatgtgtgcattcaagtcacagagttgaacattccctttcgtacagcagttttgaaacgctctttctgtagtatctggaagtgaacattaggagagctttcaggtctatgttgagaaaggaaatatcttcaaataaaaactagacagaagcattctcataaacttgtttgtgatgtgtgaactcagctaacagaggtggatctttcttttgatagagcagttctgaaaaacacttttgtttaatctgcaagtggacatttggatagatttgaagatttcgttggaaacgggaatatcttcatatcaaatctagacagaagcattctcagaaacgtctttgtgatgtttgcattcaactcatagagttgaacattccgtttcagagagcagctttgaggcactctttttgtagtatgtgcaagtggatatttggagcgctctgaggcctgcggtgaaaaagcaaatatcttcccataaccactagacagaaacattctcagaaactcctttatgacgtatgcactcacctaacagagaagaaccttccttttgacagagcagttttgatacactctttttgtagaatctgcaagtggatatttggatagctgtgaagatttcgttggaaacgggaataccttcctataaaatctagacagaagcattctcagaaactgctctgtgatgtctgcattcaagtcacagagttgaacattgcctttcctagagcaggtttgaaacgctctttttgtagaatatggaagtggatgtttcggacggttggaggcccatggtgataaagggaaaatcttcccctacaagctagaaagaagcattgtgtgaaacttgtttgtgatgtgtgtactcaactaacagagttgaacctttctttttacagagcagttttgaaacactctttttgtagaatctgcaaggggatatttggatagatttcagggatttcgttggaaacgggaatatcttcatataaaatctcgacagaagcattctcagaaacttctttgtgatatctgcattccagtcacagagttgaatattccctttcacagagtaggtttgaaacactctttttatagtatctggaattggacatttggagcgccttgacgcctacggtgaaaagggaaatatcttccgataaaaactagacagaagaaatctcagaatcttctttgggatatatgcacgcagctaacagagttgaacctttctattgacagagcagttttgaaacagtctttctgtggaatctgcaagtggatatttggataacttggaggatttcgttggaaacgggattacgtataaaaagtagacagcagcatcctcagaaacatccttgtgatgtgtgcattcaagtcacagagttgaacattccctttcgtacagcagttttgaaacactctttctgtagtatctgtaagtgaactttaggacagctttcaggtctatagtgagaaaggatatatcttcaaataaaaactagacagaagcatactcataaacttgttcgtgatgtgtgaactcagctaagagccgtggatctttcttttgatagagcagttctgaaaaacactttttgttgaatctgcaagtggacatttgcatagatttgaagatttctttggaaacgggaatatcttcatatcaaatctagacagaagcattctcagaaacgtctttgtggtgtttgcattcaactcatagagttgaacattccgtttcagagagcagctttgaagcactctttttgtagtatgtgcaagtggatatttggagcgctctgaggcctacggggaaaaagcaaatatcttcccataaccactagactgaaacattctcagaaactcctttatgacgtatgcactcacctaacagagaagaaccttccttttgacagagcagttttgatacactctttttgtagaatctgcaagtggatattaggatagctgtgaagatttcgttggaaacgggaatatcttcctataaaatctagacagaagcattctcagaaattgctctgtgatgtcttcattcaagtcacagagttgaacattgcctttcatagagcaggtttgaaacactctttttttagtatatggaagtggacgtttcggacggtttgaggcccatggtgataaagggaatatcttcccctacaagctagaaagaatcattctgtgaaacttgtttgtgatgtgtgtactcaactaacagagttgaacctttctttttacagagcagttttgaaacactctttttgtagaatctgcgaggggatatttggagagatttcaggatttcgttggaaacgggaatatcttcatataaaatctcgacagaagcattctcagaaacatctttgtgatatgtgcattcaagtcacagagttgaatattccctttcacagagtaggtttgaaacactctttttgtagtatctggaagtggacatttggagcgccttgacgcctacggtgaaaagggaaatatcttcccataaaaactagacagaagcaatctcagaatcttctttgggatatatgcacgcagctaacagagttgaacctttcttttgacagagcagttttgaaacagtctttctgtggaatctgcaagtggatatttggatagcttggaggatttcgttggaaacggtattacgtataaaaagtagacagccatcctcagaaacttctttgtgatgtgtgcattcaagtcacagagttgaacattccctttcgtacagcagttttgaaacactctttctgtagtatctggaagtgaacattaggacagctttcaggtctatggtgagaaaggaaatatcttcaaataaaaactagacagaagcattctcataaacttgtttgtgatgtgtgaactcagctaagagacgtggatctttcttttgatagagcaggtctgaaaaacacgttttgttgaatctgcaagtggacatttggatagatttgaagatttcgttggaaacgggaataacttcatatcaaatctagacagaagcattctcagaaacgtctttgtgatgtttgcattcaactcatagagttgaacattcccttttagagagcagctttgaagcactctttttgtagtatgtgcaagtggatatttggagcgctctgaggtctacggtgaaaaagcaaatatcttcccataaccactagacagaaacattctcagaaactcctttatgacgtatgtactcaactaacagagaagaaccttccttttgacagagcagttttgatacactctttttgtagaatctgcaagtggatatttggatagctgtgaagatttcgttggaaaagggaatatcttcctataaaatctagacagaagcattctcagaaactgctctgtgatgtctgcattcaagtcacacagttgaacattgcctttcatagagcaggtttgaaacgctctttttgtagtatatggaagtggacgtttcggacggtttgaggcccatggtgataaaggaaatatcttcccctacaagctagaaagaagcattgtgtgaaacttgtttgtgatgtgtgtactcaactaacagagttgaacctttctttttacagagcagttttgaaacactcttttgtagaatctgcaaggggatatttggatacatttcaggatttcgttggaaacgggaatatcttcatataaaatctcgacagaagcattctcagaagcttctttgtgatatgtgcattcaagtcacagacttgaatattccctttcacagagtaggtttgaaacattctttttgtagtatctggaagtggacatttggagcgccttgacgcctacggtgaaaagggaaatatcttctcataaaaagtagacacaagcaatctcagaatctcctttgggatatatgcacgcagctaacagagttgaacctttctattgacagagcagttttgaaacagtctttctgtggaatctgcaattggatatttggatagcttggaggatttcgttggaaacgggatttcgtataaaaagtagacagcagcatcctcagaaacttctttgtgatgtgtgcattcaagtcacagggttgaacattccctttcgtacaacagttttgaaacactctttctgtagtatctgaagtgaacaataggacagctttcaggtctatgatgagaaaggaaatatcttcaaataaaaactagacagaagcattctcataaacttgtttgtgatgtgtgaactcagctaacagaggtggatctttcttttgatacagcagttttgaaaaacactttttgttgaatctgcaagtggacatttggatagatatgaagatttcgttggaaacgggaatatcttcatatcaaatctagacagaagcattctcagaaacgtctttgtgatgtttgcattcaactcatagagttgaacattccgtttcagagagcagctgtgaggcactctttttgtagtatgtgcaagtggatatttggagcgctctgaggcctacggtgaaaaagcaaatatcttcccataaccactagacagaaacattctcagaaactcctttatgacgtatgcactcacctaacagagaagaaccttccttttgacagagcagttttgatacactctttttgtagaatctgcaagtggatatttggatagctgcgaagatttcgttggaaacgggaatatcttcctataaaatctagacagaagcattctcagacactgctctgcgatgtctgcattcaagtcacagagttgaacattgcctttcatagagcaggtttgaaacgctctttttgtagtatatggaagtggacttatcggacggtttgaggcccatggtgataaagggaatatcttcccctacaagctagaaagaagcattctgtgaaacttgtttgtgatgtgtgtactcaactaacagagttgaacctttctttttacagagcagttttgaaacactctttttgtagaatctgcgaggggatatttggatacatttcagcatttagttggaaacgggaatatcttcatataaaatctcgacagaagcattctcagaaacttctttgtgatatgtgcattcaagtcacagagttgaatgttccctttcacagagtaggtttgaaacactctttttgtagtatctggaagaggacatttggagcgccttgacgcgtacggtgaaaagggaaatatcttctcataaaaagtagacagaagcaatctcagaatcttctttgggatatatgcacgcagctaacagagttgaacctttctattgacagagcagttttgaaacagtctttctgtggaatctgcaagtggatatgtggatagattggaggatttcgttggaaacgggattacgtataaaaattagacagcagcatcctcagaaacttctttgtgatgtgtgcattcaagtcacagagttgaacttccctttcgtacagcagttttgaaacactctttctgtagtatctggaagtgaacattaggacagctttcaggtctatggtgagaaaggaaatatcttcaaataaaaactagacagaagcattctcataaacttgtttgtgatgtgtgaactccgctaacagaggtggatctttcttttgatagagcagttctgaaaaacactttttgttgaatctgcaagtggacatttggatagatttgaagatttcgttggaaacgggaatatcttcatatcaaatctagacagacgcattctcagaaacgtctttgtgatgtttacattcaactcatagagttgaacattccctttcagagagcagctttgaagcactctttttgtagcatgtgcaagtggacatttggagcgctctgaggcctacggggaaaaagcaaatatcttcccataaccactagacagaaacattctcagaaacttctttatgacgtatgtactcaactagcagagaagaactgtcctcttgacagagcatttttgatacactctttttgtagtatctgcaagtggatatttggatagctgtgaagatttcgttggaatcgggaatatcttcctataaagtccggacagaagcattctcagaaactgctctgtgatgtttgctttcatgtcacagagttgaacattgcctttcatagagcaggtttcaagcactctttttttagtatatggaagtggacgtttcggacggtttgaggcccatggtgataaaggaaatatcttcccctagaagctagaaagaagcattctgtgaaacttgtttgtgatgtgtgtactcaactaacagagttgaacctttctttttacagagcacttttgaaacactctttttgtagaatctgcgaggggatatttggatagatttcaggatttcgttggaaacgggaatatcttcatataaaatctcgacagaagcattctcagaaacttctttgtgatatctgcattcaagtcacagagttgaatattccctttcacagagtaggtttgaaacactctttttgtagtatctggaagtggacatttggagcgccttgacgcctacagtgaaaagggaaatatcttccaataaaaactagacagaaagcaatctcagaatcttctttgggatatatgcacgcagctaacagagttgaacctttctattgacagagcagttttgaaacagtctttctgtggaatctgcaagtggatatttggatagcttggaggatttcgttggaaacgggattacgtataaaaagtagacagagcatcctcagaaaattctttgtgatgtgtgcattcaagtcacagagttgaacattccctttcgtacagcagttttgaaacactctttctgtagtatctggaagtgaacattaggacagctttcagctctatggtgagaaaggaaatatcttcaaataaaaactagacagaagcattctcataaacttgtttgtgatgtctgaactcagctaacagacgtggatcgttcttttgatacagcagttttgaaaaacactttttgttgaatctgcaagtggacatttggatagatttgaagatttcgttggaaacgggaatatcttcatatcaaatctagacagaagcattctcagaaacgtcgttgtgatgtttgcattcaactcatagagttgaacattccgattcagagagcagctttgaggcactctttttgtagtatgtgcaagtggatatttggagcgctctgaggcctacggtgaaaaagcaaatatcttcccataaccactagacagaaacattctcagaaactcctttatgacgtatgcactcacctaacagagaagaaccttccttttgacagagcagttttgatacactctttttgtagagtctgcaagtggatatttggatagctgtgaagatttcgttggaaacgggaatatcttcctataaaatctagacagaagcattctcagaaactgctctgtgatgtctgtattcaagtcacagagttgaacattgcctttcatagagcaggtttgaaacgctctttttgtagtatatgtaagtggatgtttcggacggttggaggcccatggtgataaagggaatatcttcccctacaagctagaaagaagcattctgtgaaacttgtttgtgatgtgtgtactcaactaacagagttgaacctttctttttacagagcagttttgaaacactctttttgtagaatctgcgaggggatatttggagagatttcaggatttcgttggaaccgggaatatcttcatataaaatctcgacagaagcattctcagaaacttctttgtgatatctgcattcaagtcacagagttgaatattccgtttcacagagtaggtttgaaacactctttttgtagtatctggaagtggacatttggagcgccttgacacctacggtgaaaagggaaatatcttcccataaaaactagacagaagcaatctcagaatcttctttgggatatatgcacgcagctaacagagttgaacctttctattgacagagcagttttgatacagtctttctgtggaatctgcaagtggatatttggatagcttggaggatttcgttggaaacgggattacgtataaaaagtagacagcagcatcctcagaaacttctttgtgatgtgtgcattcaagtcacagagttgaacattccctttcgtacagcagttttgaaacactctttctgtagtatctggaagtgaacattaggacagctttcaggtctctggtgagaaaggaaatatcttcaaataaaaactagacagaagcattctcataaacttgtttgtgatgtgtgaactcagctaacagaggtggatctttcttttgatagagcagttctgaaaaacacgttttgttgaatctgcaagtggacatttggatagatttgaagatttctttggaaacgggaatatcgtcatatcaaatctagacagaagcattctcagaaacgtctttgtcatgtttgcattcaactcatagagttgaacattccctttcagagagcagctttgaaacactctttttgtagtatgtgcaagtggatatttggagcgctctgaggcctacggtgaaaaagcaaatatcttcccataaccactagacagaaacattctcagaaactcctttatgacgtatgcactcacctaacagagaagaaccttccttttgacagagcagttttgatacactctttttgtagaatctgcaagtggatatttcgatagctgtgaagattttgttggaaacgggaatatcttcctataaaatctagacagaagcattctcagaaactgctctgtgatgtctgcattcaagtcacagagttgaacattgcctttcatagagcaggtttgaaacgctctttttgtagtatatggaagtggacgtttcggacggtttgaggcccatggtgataaggggaatatcattcccctacaagctagaaagaagcattctgtgaaacttgtgatgtgtgtactcaactaacagagttgaacctttctttttacagagcagttttgaaacactctttttgtagaatctgcgaggggatatttggatagatttcaggatttcgttggaaacgggaatatcttcatataaaatctcgacagaagcattctcagaaacttctttggaatatgtgtattcaagtcacagagttgaatactccctttcacagagtaggtttgaaacactctttttgtagtatctggaagtggacattttgagcgccttgacgcctacggtgaaaagggaaatatcttcccataaaaactagacagaagcaatctcagaatcttctttgggatatatgcacgcagctaacagagttgaacctttctattgacagagcagttttgaaacagtctttctgtggaatctggaagtggatatttggatagcttggaggatttcgttggaaacgggattaagtataaaaagtagacagcagcatcctcagaaacttctttgtgatgtgtgcattcaagtcacagagttgaacattccctttcgtacagcagttttgaaacactctttctgtagtatctggaagtgaacattaggacagctttcagctctatggtgagaaaggaaatatctttaaataaaaacgagacagaagcattctcataaactttttgtgatgtgtgaactcagctaacagaggtggatctttcttttgatagagaagtactgaaaaacactttttgttgaatctgcaagtggacatttggatagatttgaagatttcgttggaaacgggaatatcttcatatcaaatctagacagaagcattctcggaaacgtctttgtcatgtttgcattcaactcatagagttgaacattccgtttcagagagcagctttgaagcactctttttgtagtatgtgcaaggggatatttggagcgctctgaggcctaaggtgaaaatgcaaatatcttcccataaccactaaacagaaacattctcataaactcctttatgacgtatgtactcaactaacagagaagaaccttccttttgacagagccgttttgatacactctttttgtagaatctgcaagtggatatttggatagctgtgaagatttcgttggaaacgggaatatcttcctataaaatctagacagaagcattctcagaaagtgctctgtgatgtctgcattcaagtcacagagttgaacattgcctttcatagagcaggtttgaaacactctttttgtagtatatggaagtggacgtttcggacggtttgaggcccatggtgataatgggaatatcttcccctacaagctagaaagaagcattctgtgaaacttgtttgtgatgtgtgtactcaactaacagggttgaacctttctttttacagagcagttttgaaacactctttttgtagaatctgcgaggggatatttggatagatttcaggatttcattggaaacgggaatatcttcatataaaatctcgacagaagcattctcagaaacttctttgtgatatgtgcattcaagtcacagagttgaatattccctttcacagagtaggtttaaaacactctttttgtagtatctggaagtggacatttggagcgccttgacgcctacggtgaaaagggaaatatcttctcataaaaactagacagaagcaatctcagaatcttctttgggatatatgcacgcagctaatagagttgaacttttctattgacagagcagatttcaaacagtctttctgtggaatctgcaagtggatatttggatagcctggaggatttcgttggaaacgggattacgtataaaaagtagacagcagcatcctcagaaacatccttgtgatgtgtgcattcaagtcacagagttgaacatttcctttcgtacagcagttttgaaacactctttctgtagtatctggaagtgaactttaggagagctttcaggtctatagtgagaaaggatatatcttcaaataaaaactagacagaagcattctcataaacttgtttgtgatgtgtgaactcagctaacagaggtggatctttcttttgatagagcagttctgaaaaacactttttgttgaatctgcaagtgtacatttggatagatttgaagatttccttggaaacgggaatatcttcatatcaaatctagacagaagaattctcagaaacgtctttgtgatgtttgcattcaactcatagagttgaacattccctttcagagagcagctttgaagcactctttttgtagtatgtgcaagtggatatttggagcgctctgaggcctacggtgaaaaatcaaatatcttcccataaccactagacagaaacattctcagaaactcctttatgacgtatgtactcaactaacagagaagaaccttccttttgacagagcagttttgatacactctttttgtagaatctgcaagtggatatttggatagctgtgaagattttgttggaaacgggaatataaaatctagacagaagcattctcagaaactgctctgtgatgtctgcattcaagtcacagagttgaacattgcctttcatagagcaggtttgaaacgctctttttctagtatatggaagttggacgtttcggacggtttgaggcccatggtgataaagggaatatcttcccctacaagctagaaagaaccattgtgtgaaacttgtttgtgatgtgtgtactcaactaacagagttgaacctttctttttacagagcagttttgaaacactctttttgtagaatctgcgaggggatatttggatagatttcagcatttcgttggaaacgggaatatcttcatataaaatctcgacagaagcattctcagaaacttctttgtgatatgtgcattcaagtcacagagttgaatattccctttcacagagtaggtttgaaacactctttttgtagtatctggaagtggacatttggagcgccttgacgcccacggtgaaaagggaaatatcttcccataaaaactagacagaagcaatctcagaatcttctttgggatatatgcacgcagctaacagagttgaacctttctattgacagagcagttttgtaacagtctttctgtggaatctgcaagtggatatttggatagcttggaggatttcgttggaaacgggtttacgtataaaaagtagacagcagcatcctcagaaacttctttgtgatgtgtgcattcaagtcacagagttgaacattccctttcgtagagcagttttgaaacactctttctatagtatctggaagtgaacattaggacagctttcaggtctatggtgagaaaggaaatatcttcaaataaaaattagacagaagcattctcataaacttgtttgtgatgtgtgaactcagctaacagagatggatctttcttttgatagagcagatctgaaaaacactttttgttgaatctgcaattggacatttggatagatttgaagatttcgttggaaacgggaatatcttcatatcaaatctagacagaagcattctcagaaacttctttgtgatgtttgcattcaactcatagagttgaacattccatttcagagagcagctttgaggcactctttttgtagtatgtgcaagtggatagttggagcgctctgaggcctacggtgaaaaagcaaatatcttcccataaccactagacagaaacattctcagaaactcctttatgacgtatgcactcatctaacagagaagaaccttccttttgacagagcagttttgatacactctttttgtagaatctgcaagtggatatttggatagctgtgaagatttctttggaaacgggaatatcttcctataaaatctagacagaagcattctcagaaactgctctgtgatgtctgcattcaagtcacagagttgaacattgcctttcatagagcaggtttgaaacgctctttttgtagtatataaaagtggacgtttcggacggtttgaggcccatggtgataaagggaatatcttcccctacaagctagaaagaagcattctgtgaaacttgtttgtgatgtgtgtactcaactaacagagttgaacctttctttttacagagcagttttgaaacactctttttgtagaatctgcgaggggatatttgtatagatttcaggattttgttggaaacgggaatatcttcatataaaatctcgacagaagcattctcagaaacttctttgtgatatgtgtattcaagtcacagagttgaatattccctttcacagagtaggtttgaaacactctttttgtagtatcaggaagtggacatttggagcgccttgacacttatggtgaaaagggaaatatcttcccataaaaactagacagaagcattctgtgaaacttgtttgtgatgtttgtactcaactaacagagttgaacctttctttttagagagcagttttgaaacactctttctgtagaatctgcaaggggatatttggatagatttcaggatttcgttggaaacgggaatatcttcatataaaatctcgacagaagcattctcagaaacttctttgtgatgtgtgcattcaagtcacagagttgaacattccctttcgtacagcagttttgaaacactctttctgtagtatctggaagtgaacattaggacagctttcagcactacggtgagaaaggaaatatcttcaaataaaaactagacagaagcattctcataaacttttttgtgatgtgtgaactcagctaacagaggtggatctttcttttgatagagcagttctgaaaaacactttttgttgaatctgcaagtggacatttggatagatttgaagatttcgttggaaacgggaatatcttcatatcaaatctagacagacagcattctcagaaacgtctttgtgatgtttgcattcaactcatagagttgaacattccctttcagagagcagctttgaagcactctttttgtagcatgtgcaagtggacatttggagcgccctgaggcctacggggaaaaagcaaatatcttcccataaccactagacagaaacattctcagaaactcctttatgacgtatgcactcacctaacagagaagaaccttccttttgacagagcagttttgatacactctttttgtagaatctgcatgtggatatttggatagctgtgaagatttcgttggaaacgggaatatcttcctataaaatctagacagaagcattctcagaaactgctctgtgatgtctgcattcaagtcacagagttgaacattgcctttgatagagcaggtttgaaacgctctttttgtagtatatggaagtggacgtttcggacggtttgaggcccatggtgataaagggaatatcttcccctacaagctaaaaagaagcattgtgtgaaacttgtttgtgatgtgtgtactcaactaacagagttgaacctttctttttacagagcagttttgaaacactctttttgtagaatctgcgaggggatatttggatacatttcagcatttcgttggaaacgggaatatcttcatataaaatctcgacagaagcattctcagaaacttctttgtgatatctgcctttaagtcacagcagttgaatattccctttcacagagtaggtttgaaacactctttttgtagtatctggaagtggacatttggagcgccttgacacctacggtgaaaagggaaatatcttcccataaaaactagacagaagcaatctcagaatcttctttgggatatatgcacgcagctaacagagttgaacctttctattgacagagcagttttgaaacagtctttctgtggaatttgcaagtggatatttggatagcttggaggatttcgttggaaacgggattacgtataaaaagtagacagcaccatcctcagaaacttctttgtgatgtgtgcattcaagtcacagagttgaacattccctttcgtacagcagttttgaaacactctttctgtagtatctggaagtgaacattaggacagctttcaggtcgatggtgagaaaggaaataccttcaaataaaaactagacagaagcattctcataaacttgtttgtgatgtgtgaactcagctaacagaggtggatctttcttttgatagagcagttctgaaaaacactttttgttgaatctgcaagtggacatttggatagatttgaagatttcgttccaaacgggaatatcttcatatcaaatctagacagaagcattctcagaaaacgtctttgtgatgtttgcattcaactcatagagttgaacattccgtttcagagagcaggtttgaagcactctttttgtagtatgtgcaagtggatatttggagcgctctgaggcctacggtgaaaaagcaaatatcttcccataaccactagacagaaacattctcagaaactcctttatgacgtatgcactcacctaacagagaagaaccttccttttgacagagcagttttgatacactctttttgtagaatctgcaagtggatatttggatacctgtgaagatttcgttggaaacgggaatatcttcctataaaatctagacagaagcattctcagaaactgctctgggatgtctgcattcaagtcacagagttgaacattgcctttcatagagcaggtttgaaacgctctttttgtagtatatggaagtggacttatcggacggtttgaggcccatggtgataaagggaatatcttcccctacaagctagaaagaagcattctgtgaaacttgtttgtgatgtgtgtactcaactaacagagttgaacctctctttttacagagcagttttgaaacactctttttgtagaatctgcgaggggatatttggatacatttcagcatttcgttggaaacgggaatatcttcatataaaatctcgacagaagcattctcagaaacttctttgtgatatctgcattcaagtcacagagttgaatattccctttcacagagtaggtttgaaacactctttttgtagtatctggaagtggacatttggagcgccttgacgcctacggtgaaaagggaaatatcttccataaaaactagacagaagcaatctcagaatcttctttgggatatatgcacgcagctaacagagttgaacctttctattgacagagtagttttgaaacagtctttctgtggaatctgcaagtggatatttggatagcttggaggatttcgttggaaacgggattaagtataaaaagtagacagcagcatcctcagaaacttctttgtgatgtgtgcattcaagtcacagagttgaacattccctttcccacagcagttttgaaacactctttctgtagtatctggaagtgaacattaggacagctttcaggtctatggtgagaaaggaaatatcttcaaataaaaactagacagaagcattctcataaacttgtttgtgatgtgtgaactcagctaacagaggtggatctttcttttgatacagcagttctgaaaaacactttttgttgaatctgcaagtggacatttggatagatttgaagatttcgttggaaacgggaatatcttcatatcaaatctagacagaagcattctcagaaacgtctttccgatgtttgcattcaactcatagagttgaacattccgtttcagagagcagctttgaggcactctttttgtagtatgtgcaagtggatatttggagcgctctgaggcctacggtgaaaaagcaaatatcttcccataaccactagacagaaacattctcagaaactccgtttatgacgtatgcactcacctaacagagaagaacctttcttttgacagagcagttttcatacactcttttggtagaatctgcaagtggatatttggatagctgtgaagatttcgttggaaacgggaatatcttcctataaaatctagacagaagcattctcagaaactgctctgtgatgtctgcattcaagtcacagagttcaacattgcctttcatagagcaggtatgatacgctctttttgtagtatgtggaagtggacgtttcggacggtttgaggcccatggtgataaagggaatatcttcccctacaagctagaaagaagcattctgtgaaacttgtttgtgatgtgtgtactcaactaacagggttgaacctttctttttacagagcagttttgaaacaccctttgtagaatctgcgaggggatatttggatagatttcaggatttcgttggaaacgggaatatcttcatataaaatctcgacagaagcattctcagagacttcattgtgatatctgcattcaagtcacagagttgaatattccctttcacagggtaggtttgaaacactctttttgtagtatctggaagtggacatttggagcgccttgacacctacggtgaaaagggaaatatcttcccataaaaactagacagaagcaatctcagaatcttctttgggatatatgcacgcagctaacagagttgaacctttctattgacagagcagttttgaaacagtctttctgtggaatctgcaagtggatatttggatagcttggaggatttcgttggaaacgtcattacgtataaaaagtagacagcagcatcctcagaaactactttgtgatgtgtgcattcaagtcacagagttgaacattccctttcgtacagcagttttgaaacactctttctgtagtatctggaagtgaacattaggacagctttcaggtctatggtgagaaaggcaatatcttcaaataaaaactagatagaagcattctcataaacctgtttgtgatgtgtgaactcagctaaccgaggtggatctttcttttgatagagcagttctgaaaaacactttttgttgaatctgcaagtggacatttggatagatttgaagatttcgttggaaacgggaatatcttcatatcaaatctagacagaagcattctcagaaacgtgtttgtgatgtttgcattcaacccatagagttgaagattccgtttcagagagcagctttgaagcgctctttttgtagtatgtgcaaggggatattttgagcgctctgaggcctaaggtgaaaaagcaaatatcttcccataaccactagacagaaacattctcagaaacttctttatgacgtatgtactcaactagtagagaagaactttccttttgacagagcatttttgatacactcttgttgtactatctgcaagtggatatttggatagctgtgaagatttcgttggaaacgggaatatcttcctataaagtctggacagaagcattctcagaaactgctctgtgatgtctgcattcaagtcacagagttgaacattgcctttcatagagcaggtttgaaaccctctttttgtagtatatggaagtggacgtttcggacggtttgaggcccatggtgataaagggaatatcttcccctaccagctagaaagaagcattctgtgaaacttgtttgtggtgtgtgtactcatcttacagagttgaacctttctttttacagagcagttttgaaacactctttttgtagaatctgcgaggggttatttggatagatttcaggatttcgttggaaacgggaatatcttcatataaaatctcgacagaagcattctcagaaacttctttgtgatatgtgcattcaagtcacagagttgaatattccctttcacagagtaggtttgaaacactctttttgtagtatctggaagtggacatttggagcgccttgacgcctacggagaaaagggaaatatcttcccataaaaactagacagaagcaatctcagaatcttctttgggatatatgtacgcagctaatagagttgaacctttctattgacagagcagttttgaaacagtctttctgtggaatctgcaagtggatatttggatagcttggaggatttcgttggaaacgggattacgtataaaaagtagacagcagcatcctcagaaacttctttgtgatgtgtgcattcaagtcacagagttgaacattccctttcgtacagcagttttgaaacactctttctgtagtatctggaagtgaacattaggacagctttcaggtctatggtgagaaaggaaatatcttcaaataaaaacaagacagaagcattctcataaacttgtttgtgatgtgtgaactcagctaacagaggtggatctttcttttgatagagcagttctgaaaaacactttttgttgaatctgcaagtggacatttggatagatttgaagatttcgttggaaacgggaatatcttcatatcaaatgtagacagaagcattctcagaaacgtctttgtgatgtttgcattcaactcatagagttgaacattccctttcagagagcagctttgaagcacctctttttgtagtatgtgcaagtggatatttggagcgctgtgaggcctacggtgaaaaagcaaatatcttcccataaccactagacagaaacattctcagaaactcctttatgacgtatgcactcacctaacagagaagaaccttccttttgacagagtagtttggatacactctttttgtagaatctgcaagtggatattaggatagctgtgaagatttcgttggaaacgggaatatcttcctataaaatctagacagaagcattctcagaaactgctctgtgatgtctgcattcaagtcacagagttgaacattgcttttcctagagcaggtttgaaacgctctttttgtagtatatggaagtggacgtttcggacggtttgaggcccatggtgttaaagggaaatatctttccctacaagctagaaagaagcattctgtgaaacttgtttgtgatgtgtgtactcaactaacagagttgaacctttctttttacagagcagttttgaaacactctttttgtagaatctgcgaggggatatttggatagatttcaggatttcgttggaaacgggaatatcttcatagaaaatctcgacagaagcattctctgaaacttctttgtgatatgtgcactcaagtcacagagttgaatattccctttcacagagtaggtttgaaacactctttttgtagtatctggaagtggacatttgtagctccttgacacctacggtgaaaagggaaatatcttcccataaaaactagacagaagcaatctcagaatcttctttgggatatatgcacgcagctaacagagttgaacctttctattgacagaccagttttgaaacagtctttctgtggaatctgcaagtggatatttggatagcttggaggatttcgttggaaacgggattacgcataaaaagtagacagcagcatcctccgaaacttctttgtgatgtgtgcattcaagtcacagagttgaacattccctttcgtacagcagttttgaaacactctttctgtagtatctggaagtgaacattaggacagctttcagctctatggtgagaaaggaaatatcttcaaataaaaactagacagaagcattctcataaacttgtttgcgatgtgtgaactcagctaacagagatggatctttcttttgatagagcagttctgaaaaacactttttgttgaatctgcaagtggacatttggatagatttgaagatttcgttggaaacgggaatatcttcatatcaaatctagacagaagcattctccgaaacgtctttgcgatgtttgcattcaactcatagagttgaacattccgtttcagagagcagctttgaggcactctttttgtagtatgtgcaagtggatatttggagcgctctgaggcctacggtgaaaaagcaaatatcttcccataaccactagacagaagcattctcagaaactcctttatgacgtatgcactcacctaacagaaaagaaccttccttttgacagagcagttttgatacactctttttgtagaatctgcaagtggatatttggatagctgtgaagatttcgttggaaacgggaatatcttcctataaaatttagacagaagcattctcagaaactgctctgtgatgtctgcattcaagtcacagagttgaacattgcctttcatacagcaggtttgaaatgctctttttgtagtatatggaagtggacttttcggacggtttgaggaccatggtgataaaggggaatcttcccctacaagctagaaagaagcattctgttaaacttgtttgtgatgtgtgtactcaactaatagatttgaacctttctttttacagagcagttttgaaacactctttttgtagaatctgcgaggggatatttggatagatttcaggatttcgttggaaacgggaatatcttcatataaaatctcgaaagaagcattctcagaaacttccttgtgatatgtgcattcaagtcacagagttgaatattccctttcacagagtaggtttgaaacactctttttgtagtatctggaagtcgacatttggagcgccttgacacctacggtgaaaagggaaatatcttcccataaaaactagacagaagcaatctcagaatcttctttgggatatatgcacgcagctaacagagttgaacctttctattgacagagcagttttgaaacagtctttctgtggaatctgtaagtggatatttggatagcttggaggatttcgttggaaacgggattacgtataaaaattagacagcagcatcctcagaaacttctttgtgatgtgtgcattcaagtcacagcagttgaacattccctttcgtacagcagttttgaaacactctttctgtagtatctggaagtgaacattaggacagctttcaggtctagggtgagaaaggaaataccttcaaataaaaactagacagaagcattctcataaacttgtttgtgatgtgttaactcagctaacagaggtggatctttcttttgatagagcagttctgaaaaacactttttgttgaatctgcaagtggacatttggatagatttgaagatttctttggaaacgggaatatcttcatatcaaatctagacagataggcattctcagaaacgtctttgtgatgtttgcattcaactcatagagttgaacattccctttcagagagcagctttgaagcactctttttgtagtatgtgcaaggggatatttggagcgctctgaggcctaaggtgaaaaagcaaatatcttcccataaccactagacagaaacattctcagaaactcctttatgacgtatgtactcaactaacagagaagaaccttccttttgacagagcagttttgatacactctttttgtagaatctgcaagtggatatttggatagctgtgaagatttcattggaaacgggaatatcttcctataaaatccagacagaagcattctcagaaactgctctgtgatgtctgcattcaagtcacagagttgaacattgcctttcatagagtaggtttgaaacgctctttttgtagtatatggaagtagacgtttcggacggtttgaggcccatggtgataaagggaatatcttcccctacaagctagaaagaagcattctgtgaaacttgtttgtgatgtgtgtactcaactaacagagttggacctttctttttacagagcagttttgaaacactctttttgtagaatctgcgaggggatatttggatagatttcaggatttcgttggaaacgggaatatcttcatataaaatctcgacagaagcattctcagaaacttccttgtgatatgtgcattcaagtcacagagttgaatattccctttcacagagtaggtttgaaactctctttttgtagtatctggaagtggtcatttggagcgccttgacgcctacggtgaaaagggaaatatcttcccatcaaaactagacagaagcaatctcagaatcttctttgggatatatgcacgcagctaacagagttgaaccattctattgacagagcagttttgaaacagtctttctgtggaatctgcaagtggatatttggatagcttggaggatttcgttggaaacgggattacgtataaaaagtagacagcagcatcctcagtaaacatccttgtgatgtgtgcattcaagtcacagagttgaacattccctttcgtacagcagttttgaaacactctttctgtagtatctggaagtgaactttaggacagctttcaggtctatagttagaaaggatatatcttcaaataaaaactagacggaagcattctcataaacttgtttgtgatgtgtgaactcagctaacagaggtggacctttcttttgatagagcagttctgaaaaacactttttgttgaatctgcaagtggacatttggatagatttgaagatttcgttggaaacgggaatatcttcatatcaaatctagacagaagcattctcagaaacgtctttgcgatgtttgcattcaactcatagagttgaacactccgtttcagagagcagctttgaggcactctttttgtagtatgtgcaagtggatatttggagcgctctgaggcctacggtgaaagagcaaatatcttcccataaccactagacagaaacattctcagaaactcctcttatgacgtatgtcatctcaactaacagagaagaaccttccttttgacagagcagttttgatacactctttttgtagaatctgcaagtggatatttggatagctgtgaagatttcgttggaaacgggaatatcttcctatataatctagacagaagcattctcagaaactgctctgtgatgtgtgcattcaagtcacagagttgaacattgactttcatagagcaggttagaaacgctctttttgtactatatggaagaggacgtttcggacggtttgaggaccatggtgataaagggaatatcttcccctacaagctagaaagaagcattctgtgatacttgtttgtgatgtgtgtactcaactaacagagttgaacctttctttttacagaacagttttgaaacactctttttgtagaatctgcgaggggatatttggatagatttcaggatttcgttggaaacgggaatatcttcatataaaatctcgacagaagcattctcagaaacttctttgtgatatgtgcattcaagtcacagagttgaatattccctttcacagagtaggtttgaaacactctttttgtaatatctggaagtggacatttggagcaccttgacgcctacggtgaaaagggaaatatcttcccataaaaactagacagaagcaatctcagaatcttctttgggatatatgcatgcagctaacagagttgaacctttctattgacagagcagttttgaaacagtctttctgtggaatctgcaagtggatatttggatagcctggaggatttcgttggaaacgggattacgtataaaaagtagacagcagcatcctcagaaacttctttgtgatgtgtgcattcaagtcacagagttgaacattccctttcgtacagcagttgtgaaacactctttctgtagtatctgcaagtgaacattaggacagttttcaggtctatggtgagaaaggaaatatcttcaaataaaaactagacagaagcattctcataaacttgtttgtgatgtgtgaactcagctaacagaggtggatctttcttttgatagagcagttctgaaaaacactttttgttgaatctgcaagtggacatttggatagatttgaagatttcgttggtaacgggaatatcttcatatcaaatctagacagaagcattctcagaaacgtctttgtcatgtttgcattcaactcatagagttgaacattccctttcagagagcagctttgaaacactctttttgtagtatgtgcaagtggatatttggagcgctctgaggcctacggtgaaaaagcaaatatcttcccataaccactagactgaaacattctcagaaacttctttatgacgtatgtactgaactagcagagaagaactgtcctcttgacagagcatttttgatacactctttttgtagtatctgcaagtggatatttggatagctgtgaagatttcgttggaatcgggaatatcttcctataaagtccggacagaagcattctcagaaactgctctgtgatgtctgcattcaagtcacagagctgaacattgcctttcatagagcaggtttgaaacgctctttttgtagtatatggaagtggacgtttcggacggtttgaggcccatggtgataaagggaatatacttcccctacaagctagaaagaagcattctgtgaaaattgtttgtgatgtgtgtactcaactaacagagttgaacctttctttttacagagcagttttgaaacactctttttgtagaatctgcgaggggatatttggatagatttcaggattttgttggaaaccggaatatcttaatataaaatctcgacagaagcattctcagaaactttccttgtgatatgtgcattcaagtcacagagttgaatattccctttcacagagtaggtttgaaacactctttttgtagtatctggaagtggtcatttggagcgccttgacgcctacggtgaaaagggaaatatcttcccataaaaactagacagaagcaatctcagaaacttctttgggatatttgcacgcagctaacagagttgaacctttctattgacagagcagttttgaaacagtctttctgtggaatctgcaagtggatatttggatagcttggaggatttcgttggaaacgggattacgtgtaaaaattagacagcagcatcctcagaaacttctttgtgatgtgtgcattcaagtcacagagttgaacattccctttcgtacagcagttttgaaacactctttctgtagtaactggaagtgaacattaggacagctttcaggtctatggtgagaaaggaaatatcttcaaataaaaactagacagaagcattctcataaacttgtttgtgatgtgtgaacgcagctaacacacgtggatctttcttttgatagagcagttctgaaaaacactttttgttgaatctgcaagtggacatttggatagatttgaagatttctttggaaacgggaatatcttcatatcaaatctagacagaagcattctcagaaacgtctttgtgatggtagcattcagctcatacagttgaacattccctttcagagagcagctttgaagcactctttttgtagtatgtgcaagtggacatttggagcgctttgaggtctacggggaaaaagcaaatatcttcccatatcccctagacaggaacattctcagaaactcctttatgacgtatgtactcaactaacggagaagaaccttccttttgacagagcagttttgatacactctttttgtagaatctgcaagtggatatttggatagctgtgaagatttcgttggaaacgggaatatcttcctataaaatctagacagaagcattctcagaaactgctctgtgatgtctgcattcaagtcacagagttgaacattgcctttcctagagcaggtttgaaacgctctttgtgtagtatatggaagtggacgtttcggacggtttgaggcccatggtgataaagggaatatcttcccctacaagctagaaagaagcattctcatcaacttgtttgtgatgtgtgaactcagctaacagaggtggatctttcttttgatagagcagttctgaaaaacactttttgttgaatctgcaagtggacatttggatagatttgaagatttcgttggaaacgggaatatcttcatataaaatctcgacagaagcattctcagaaacttccttgtgatatgtgcattcaagtcacagagttgaatattccctttcacagagtaggtttgaaacactctttttgtagtatctggaagtggacatttggagcgccttgacacctacggtgaaaagggaaatatcttcccatcaaaactagacagaagctatctcagaatcttctttgggatatatgcacgtagctaacagagttgaacctttcttttgacagagcagttttgaaacagtctttctgtggaatctgcaagtggatatttggatagcttggaggatttcgttggaaacgggattatgtataaaaagtagacagcagcatcctcagaaacttctttgtgatgtgtgcattcaagtcacagagttgaacattccctttcgtacagcagttttgaaacactctttctgtagtatctggaagtgaacattaggacagctttcagctcctatggtgagaaaggaaatatcttcaaataaaaactagacagaagcattctcataaacttgtttgtgatgtgtgaactcagctaacagacgtggatctttcttttgatacagcagttttgaaaaacactttttgttgaatctgcaagtggacatttggatagatttgaagatttccttggaaacgggaatatcttcatatcaaatctagacagaagcattcttggaaacgtctttgtgatgtttgcattcaactcatagagttgaacattccgtttcagagagcagctttgaagcactctttttgtagtatgtgcaagtggatatttggagcgctctgaggcctacggtgaaaaagcaaatatcttcccataaccactacacagaaacattctcagaaactcctttatgacgtatgcactcacctaacagagaagaaccttccttttgacagaccacttttgatacactctttttgtagaatctgaaagtggatatttggatagctgtgaagatttcgttggaaacgggaatatcttcctataaaatctagacagaagcattctcagaaactgctctgtgatgtctgcattcaagtcacagagttcaacattgcctttcatagagcaggtttgaaacgctctttttgtagtatatggaagtggatgtttcggacggttggagtcccatggtgataaagggaatatcttcccctacaagctagaaagaagcattctgtgaaacttgtttgtgatgtgtgtactcaactaacagagttgaacctttcttttcacagagcagttttgaaacactctttttgtagaatctgcgagcggatatttggatagatttcaggatttcgttggaaacgggaatatcttcatataaaatctcgacagaagcattctcagaagcttcgttgtgatatgtgcattcaagtcacagagttgaatattcccttacacagagtaggtttgaaacacactttttgtagtatctggaagtggacttttggagcgccttgatgcctacggtgaaaagggaaatatcttctcataaaaagtagacagaaagcaatctcagaaatcttctttgggatatatgcacgcagctaacagagttgaacctttctattgacagagcagttttgaaacagtctttctgtggaatctgcaagtggatatttggatagcttggaggatttcgttggaaacgggattaagtataaaaagtagacagcagcatcctcagaaacatccttgtgatgtgtgcattcaagtcacagagttgaacattccctttcctacagcagttttgaaacactctttctgtagtatctggaagtgaactttaggagagctttcaggtctatagtgagaaaggatatatcttcaaataaaagctagacagaagcattctgataaacttgtttgtgaagtgtgatctcagctaacagaggtggatctttcttttgatagagcagttctgaaaaacactttgttgaatctgcaagtggacatttggatagatttgaagatttctttggaaacgggaatatcttcatatcaaatctagacagaaagcattctcagaaacgtctttgtcatgtttgcattcaactcatagagttgaacattccctttcagagagcagctttgaaacactctttttgtagtatgtgcaagtggatatttggagcgctctgaggcctacggtgaaaaagcaaatatcttcccataaccactagacagaaacattctcagaaactcctttatgacgtatgcactcacctaacagagaagaaccttccttttgacagagcagttttgatacactctttttgtagaatctgcaagtggatatttggatagctgtgaagatttcgttggaaacgggaatatcttcctataaaatctatacagaaggattctcagaaactgctctgtgatgtctgcattcaagtcacagagttgaacattgcctttcatagagcaggtttgaaacgctctttttgtagtatatggaagtggacttttcggacggtttgaggcccatggtgataaagggaatatcttcccctacaagctagaaagaagcattctctgaaacttgtttgtgatgtgtgtactcaactaacagagttgaacctttctttttacagagcacttttgaaacactctttttgtagaatctgcgaggggatatttggatagatttcaggatttcgttggaaacgggaatatcttcatataaaatctcgacagaagcattctcagaaacttctttgtgatatgtgtattcaagtcacagagttgaatattcgctttcatagagtaggtttgaaacactctttttgtagtatctggaagtggatatttggagcgccttgacgcctacggtgaaaagggaaatatcttcccataaaaactagacagaagcaatctcagaatcttctttgggatatatgtacgcagctaatagagttgaacctttctattgacagagcagttttgaaacagtctttctgtggaatctgcaagtggatatttggatagcttggaggatttcgttggaaacgggattacggtataaaaagtagacagcagcatcctcagaaacttccttgtgatgtgtgcattcaagtcacagagttgaacattccctttcgtacagcatttttgaaacactctttctgtagtatctggaagtgaactttatgagagctttcaggtctatagtgagaaaggatatatcttcaaataaaaactagacagaagcattctcataaacttgtttgtgatgtgtgaactcagctaacagaggtggatctttcttttgatagagcagttctgaaaaacacgttttgttgaatctgcaagtggacatttggatagatttgaagatgtcattggaaacgggaatatcttcatatcaaatctagacagaagcattctcagaaacgtctttgtgatgtttgcattcaactcatagagttgaacattccgtttcagagaccagctttgaagcactctttttgtagtatgtgcaagtggatatttggagcgctctgaggcctacggtgaaaaagcaaatatcttcccataaccactagacagaaaacattctcagtaaactcctttatgacgtatgcactcacctaacagaggaagaaccttccttttgacagagcagttttgatacactctttttgtagaatctgcaagtggatatttggatagctgtgaatatttcgttggaaacgggaatatcttcctataaaatctagacagaagcattctcagaaactactctgtgatgtctgcattcaagtcacagagttgaacattgcctttcctagagcaggtttgaaacgctctttttgtagtatatggaagtggacgtttcggacggtttgaggaccatggtgataaagggaatatcttcccctacaagctagaaagaagcattctgtgaaacttgtttgtgaggtgtgtactcaactaacagagttgaacctttctttttacagagcagttttgaaacactctttttgtagaatctgcgaggggatatttggatagatttcaggatttcgttggaaaggggaatatcttcatataaaattctcgacagaagcattctcagaaacttctttgtgatatgtgcattcaagtcacagagttgaatattccctttcacagagtaggtttgaaacactctttttgtagtatctggaagtggacatttggagcgccttgacaactacggtgaaaagggaaatatcttcccataaaaactagacagaagcaatctcagaatcttctttgggatatatgcacgcagctaacagagttgaacctttctattgacagagcagttttgaaacagtctttctgtggaatctgcaagtggatatttggatagcttggaggatttcgttggaaacgggattacgtataaaaagtagccagcagcatcctcagaaacttctttgtgatgtgtgcattcaagtcacagagttgaacattccctttcgtacagcagttttgaaacactctttctgtagtatctggaagtgaacattaggacagctttcaggtgtatggtgagaaaggaaatatcttcaaataaaaactagacagaagcattctcataaacttgtttgtgatgtgtgaactcagctaacacacgtggatctttcttttgatagagcagttctgaaaaacactttttgttgaatctgcaagaggacatttggatagatttgaagatttcgttggaaacgggaatatcttcatatcaaatctagacagaagcattctcagaaacgtcgttgtgatgtttgcattcaactcatagagttgaacattccctttcagagagcagctttgaagcactctttttgtagtatgtgcaagtggacatttggagcgctttgaggcgtacggggaaaaagcaaatatcttcccataaccaccagacagaaacattctcagaaactcctttatgacgtatgcactcacctaacagagaagaacctgccttttgacagagcagttttgatacactctttttgtagaatctgcaagtggatatttggatagctgtgaagatttcgttggaaacgggaatatcttcctataaaatctagacagaagcattctcagaaactgctctgtgatgtctgcattcaagtcacagagttgaacgttgcctttcatagagcaggtttgaaacactctttttgtagtatatggaagtggacgtttcggacggtttgaggcccatggtgataaagggaatatcttcccctacaagctagaaagaagcattctgtgaaacttgtttgtgatgtgtgtactcaactaacagagttgaacctttctttttacagagcagttttgaaacactctttttgtagaatctgcgaggggatatttggatagatttcaggatttcgttggaaaagggaatatcttcatataaaatctcgacagaagcattctcagaaacttctttgtgatatgtgcattcaagtcacagagttgaatattccctttcacagagtaggtttgaaacactctttttgtagtatctggaagtggacatttggagcgcgttgacacctatggtgaaaagggaaatatcttcccataaaaactagacagaagcaatctcagaatcttctttgggatatatgcacgcagctaacagagttgaacctttctattgacagagcagttttgaaacagtctttctgtggaatctgcaagtggatatttggatagcttggaggatttcgttagaaacgggattacgtataaaaagtagaaagcagcatcctcagaaacttctttgtgatgtgtgcattcaagtcacagagttgaacattccctttcgtacagcagttttgaaacactctttctgtagtatctggaagtgaacattaggaaagctttcaggtctatggtgagaaaggaaatatcttcaaataaaaactagacagaagcattctcataaacttgtttgtgatgtgtgaactcagctaacagacgtggatctttcttttgatacagcagttttgaaaaacactttttgttgaatctgcaagtggacatttggatagatttgaagatttcgttggaaccgggaatatcttcatatcaaatctagacagaagcattctcagaaacgtctttgtgatgtttgcattcaactcatagagttgaacattccctttcagagagcagctttgaagcactctttttgtagtatgtgcaaggggatatttggagcgctctgaggcctacggtgaaaaagcaaatatcttcccataaccactagacagaaacattctcagaaactcctttatgacgtatgcactcacctaacagagaagaaccttccttttgacagagcagttttgatacactctttttgtagaatctgcaagtggatatttggatagctgtgaaggtttctttggaaacggaaatatcttcctataaaatctagacagaagcattctcaaaactgctctgtgatgtctgcattcaagtcacagagttgaacattgcctttcatagagcaggtttgaaacgctctttttgtagtatatggaagtaaacgtttcggacggtttgaggcccatggtgataaagggaatatcttcccctacaagctagaaagaagcattctgtgaaacttgtttgtgatgtgtgtactcaactaacagagttgaacctttctttttacaggagcagttttgaaacactctttttgtagaatctgcgaggggatatttggatacatttcaggatttcgttggaaacgggaatatcttcatataaaatctcgacagaagcattctcagaaacttctttgtggtatgtgcattcaagtcacagagttgaatattccctttcacagagtatgtttgaaacactctttttgtagtatctggaagtggacatttggagcgccttgacgcctacggtgaaaagggaaatatcttcccataaaaactagacagaagcaatctcagaatcttctttgtgatatatgcacgcagctaacagagttgaacctttctattgactgagcagatttgaaacagtctttctgtggaatctgcaagtggatatttggatagattggaggatttcgttggaaacgggattacgtataaaaagtagacagcagcatcctcagaaacttctttgtgatgtgtgcattcaagtcacagagttgaacattccctttcgtacagcagttttgaaacactctttctgtagtatctggaagtgaacattaggacagctttcagctctacggtgagaaaggaaatatcttcaaataaaaactagacagaagcattctcataaacttgtttgtgatgtgtgaactcagttaacagaggtggatctttcttttgatagagcagttctgaaaaacactttttgttgaatctgcaagtggacatttggatagatttcaagatttcgttggaaacgggaatatcttcatatcaaatctagacagaagcattctcagaaacgtctttgtgatgttagcattcaactcatagagttgaacattccctttcagagagcagctttgaagcactctttttgttgtatgtgcaagtggatatttggagcgctctgaggcctatggtgaaaaagcaaatatcttcccataaccactagacagaaacattctcagaaactcctttatgacgtatgcactcacctaacagagaagaaccttccttttgacagagcagttttgatacactctttttgtagaatatgcaagtggatatttggatagctgtgaagatttcgttggaaacgggaatatcttcctataaattctagacagaagcattctcagaaactgctctgtgatgtctgcattcaagtcacagagttgaacattgcctttcatagagcaggtttgaaacgctctttttgtagtatatggaagtggatgtttctgacggttggaggcccatggtgataaagggaatatcttcccctacaagctagaaagaagcattctgtgaaacttgtttgtgatgtgtgtactcaactaacagagttgaacctttcttttcacagaacagttttgaaacactctttttgtagaatctgcgagcggatatttggatagatttcaggatttcgttggaaacgggaatatcttcatataaaatctcgacagaagcattctcagaaacttctttgtgatatctccattcaagtcacagagttgaatattccctttcacagagtaggattgaaacactctttttgtagtatctggaagtggacatttggagcgccttgacacctatggtgaaaagggaaatatcttcccataaaaactagacagaagcaatctcagaatcttctttgggatatatgcacgcagctaacagagttgaacctttctattgacagaccagttttgaaacagtctttctgtggaatctgcaagtggatatttggatagcttggaggatttcgttggaaacgggattacgtataaaaagtagacagcagcatcctcagaaacttctttgtgatgtgtgcattcaagtcacagagttgaacattccctttcgtacagcagttttgaaacactctttctgtagtatctggaagtgaatattaggacagctttcacgtctatattgagaaaggaaatatcttcaaataaaaactagacagaagcattctcataaacttgtttgtgatgtgtgaactcagctaacagagttggatctttcttttgatagagcagttctgaaaaacactttttgttgaatctgcaagtggacatttggatagatttgaagatttcgttggaaacgggaatatcttcatatcaaatctagacagaagcattctcagaaacgtctttgcgatgtttgcattcaactcatagagttgaacattccgtttcagagagcagccttgaggcactctttttgtagtatgtgcaagtggatatttggagcgctcctgaggcctacggtgaaaaagcaaatatcttcccataaccactagacagaaacattctcagaaactcctttatgacgtatgcactcacctaacagagaagaaccttccttttgacagagcagttttgatacactctttttgtagaatctgcaagtggatatttggatagctgtgaagattttgttggaaacgggaatatcttcctataaaatctagacagaagcattctcagaaactgctctgtgatgtctgcattcaagtcacagagctgaacattgcctttcatagagaaggtttgaaacgctctttttgtagtatatggaagtggacgtttcggacagtttgaggcccatggtgataaagggaatatcttcccctacaagctagaaagaagcattctgtgaaacttgtttgtgatgtgtgtactcaactaacagagttgaacctttctttttacagagcagtattgaaacactctttttgaagaatctgcgaggggatatttgaatagatttcaggatttcgttggaaacgggaatatcttcatataaaatctcgacagaagcattctcagaaacttctttgtgatatgtgcattcaagtcacagagttgaatattccctttcacagagtaggtttgaaacactctttttgtagtatctggaagtggacatttggagcgccttgacgcctagggtgaaaagggaaatatcttcccataaaaactagacagaagcaatctcagaatcttctttgggatatatgcacgcagctaacagagttgaacctttctattgacagagcagttttgaaacagtctttctgtggaatctgcaagtggatatttggatagcttggaggatttttttggaaacgggattacgtataaaaagtagacagcagcatcctcagaaacttctttgtgatgtgtgcattcaagtcacagagttgaacattccctttcgtacagcagttttgaaacactctttctgtagtatctggaagtgaacattaggacagctttcaggtctatggtaagaaaggaaatatcttcaaataaaaactagacagaagcattctcataaacttgtttgtgatgtgtgaactcagctaacaacggtggatctttcttttgatagagcagttctgaaaaacactttttgttgaatctgcaagtggacatttggatagttttgaagatttcgttggaaacgggaatatcttcatatcaaatctagacagaagcattctcagaaacgtctttgtgatgtttgcattcaactcatagagttgaacattccatttcagagagcagctttgaggcactctttttgtagtatgtgcaagtggatatttggagtgctctgaggcctacggtgaaaaagcaaatatcttcccataaccactagacagaaacattctcagaaactcctttatgacgtatgcactcacctaacagagaagaaccttccttttgacagagcagttttgatacactctttttgtagaatctgcaagtggatattttgatacctgtgaagatttcgttggaaacgggaatatcttcctataaaatgctagacagaagcattctcagaaactgctctgtgatgtctgcattcaagtcacagagttgaacattgcttttcatagagcaggtttgaaacgctctttttgtagtatatggaagtggatgtttcggacggttggaggcccatggtgataaagggaatatcttcccctacaagctagaaagaagcattctgtgaaacttgtttgtgatgtgtgtactcaactaagaaggttgaacctttctttttacagagcagttttgaaacactctttttgtagaatctgcgaggggatatttggatagatttcaggatttcgttggaaacgggaatatcttcatataaaatctcgacagaagcattctcagaaacttctttgtgatatctgcattcaagtcacagagttgaatattccctttcacagagtaggtttgaaacactctttttgtagtatctggaagtggacatttggagcgccttgacacctacggtgaaaagggaaatatcttcccataaaaactagacagaagcaatctcagaatcttctttgggatatatgcacgcagctaacagagttgaacctttcttattgacagagcagttttgaaacagtctttctgtggaatctgcaagtggatatttggatagcttggaggatttcgttggaaacgggattacgtataaaaagtagacagcagcatcctcagaaacttctttgtgatgtgtgcattcaagtcacagagttgaacattccctttcgtacagcagttttcaaacactctttctgtagtaactggaagtgaacattaggacagctttcaggtctatggtgagaaaggaaatatcttcaaataaaaactagacaaaagcattctcataaacttgtttgtgatgtgtgaactcagctaacagaggtggatctttcttttgatagagcagttctgaaaaacactttttgttgaatctgcaagtggacatttggatagatttgaagatttcgttggaaactggaatatcttcatatcaaattttgacagaagcattctcagaaacgtctttgggatgtttgcattcaactcatagagttgaacattccgtttcagagagcagctttgaggcacactttttgtagtatgtgcaagtggatatttggagcgctctgaggcctacggtgaaaaagcaaatatcttcccataaccactagacagaaacattctcagaaactcctttatgacgtatgcactcacctaacatagaagaaccttccttttgacagagcagttttgatacactctttttgtagaatctgcaagtggatatttggatagctgtgaagatttcgttggaaacaggaatatcttcctataaaatctagacagaagcattctcagaaactgctctgtgatgtctgcattcaagtcacagagttgaacattgcctttcatagagcaggtttgaaatgctctttttgtagtatatggaagtggacgtttcagacggtttgaggcccatggtgataaagggaatatcttcccctacaagctagaaagaagcattctgtgaaacttgtttgtgatgtgtgtactcaactaacagagttgaacctttctttttacagagcagttttgaaacactctttttgtagaatctgcgagggcatatttggatagatttcaggatttcgttggaaaggggaatatcttcatataaaatctcgacagaagcattctcagaaacttctttgtgatatctgccttcaagtcacagagttgaatattccctttcacacagtaggtttgaaacactctttttgtagtatctggaagtggacatttggagcgccttgacgcctacggtgaaaagggaaatatcttcccataaaaactagacagaagcaatctcagaattttctttgggatatatgcacacagctaacagagttgaacttttctattgacatagcagttttgaaacagtctttctgtggaatctgcaagtggatatttggatagcttggaggatttcgttggaaacaggattacgtataaaaagtagacagcagcatcctcagaaacttctttgtgatgtgtgcattcaagtcacagagttgaacattccctttcgtacagcagttttgaaatactctttctgtagtaactggaagtgaacattaggacagctttcaggtctatggtgagaaaggaaatatcttcaaataaaaactagacagaagcattctcataaacttgtttgtgatgtgtgaactcagctaacagaggtggatctttcctttgatagagcagttctgaaaaacactttttgttgaatctgcaagtggacatttggatagatttgaagatttcgttggaaacgggaatatcttcatatcaaatctagacagaagcattctcagaaacgtctttgtgatgtttgcattcaactcacagagttgaacattccctttcagagcgcagctttgaagcactctttttgtagtatgtgcaaggggatatttggagcgctctgaggcctacggtgaaaaagcaaatatcttcccataaccactagacagaaacattctcagaaactcctttatgacgtatgtactcaactaacagagaagaaccctctttttgacagagcagttttgatacactctttttgtagaatctgcaagtggatatttggatagctgtgaagatttcgttggaaacgggaatatcttcctataaaatctagacagaagcattctcagaaactgctctgtgatgtctgcattcaagtcacagagttgaacattgcctttcatagagcaggtttgaaacgctctttttgtactatatggaagaggacgtttcgaacggtttgaggaccatggtgataaagggaatatcttcccctacaagctagaaagaagcattctgtgaaacttgtttgtgatgtgtgtactcaactaacagagttgaacctttcttttcacagagcagttttgaaacactctttttgtagaatctgcgaggggatatttggatacatttcaggatttcgttggaaacgggaatatcttcatataaaatctcgacagaagcattctcagaaacttctttgtgatatctgcattacagtcacagagttgaatattccctttcacagaggaggtttgaaacactctttttatactatctggaattggacattggagcgccttgacgcctacggtgaaaagggaaatatcttcccataaaaactagacagaagcaatctcagaatcttctttgggatatatgcacgcagctaacatagttgaacctttctattgacagaacagttttgaaacagtgtttctgtggaatctgcaagtggatatttggatagcttggaggatttcgttggaaacgggattacgtataaaaagtagacagcagcatcctcagaaacttctttgtgatgtgtgcattcaagtcacagagttgaacattccctttcgtacagcagttttgaaacactctttctgtagtatctggaagtgaacattaggacagctttcactctatggtgagaagggaaatatcttcaaataaaaactagacagaagcattctcaaaaacttgtttgtgaagtgtgaactcaggtaacagaggtggatctttattttgatagagcagttctgaaaaacactttttgttgaatctgcaagtggacatttggatagatttgaagatttcgttggaaacgggaatatcttcatatcaaatctagacagaagcattctcagtaaacgtctttgtgatgtttgcattcaactcatagagttgaacattccgtttcagagagcagctttgaagcactctttttgtagtatgttcaagtggatatttggagcgctctgaggcctacggtgaaaaagcaaatatcttcccataaccactagacagaaacattctcagaaactcctttatgatgtatgcactcacctaacagagaagaaccttccttttgacagagtagttttgatacactctttttgtagaatctgcaagtggatatttggatagctgtgaagatttcgttggaaacagggaatatcttcctataaaatctagacagaagcattctcagaaactgctctgtgatgtctgcattcaagtcacagagttgaacattgcctttcatagagcaggtttgaaacgctctttttgtactatatggaagtggacgtttcggacggtttgaggcccatggtgataaagggaatatcttcccctacaagctagaaagaagcattctgtgaaacttgtttgtgaagtgtgtactcaactaacagagttgaacctttctttttacagagcagttttgaaacactctttttgtagaatctgcgaggggatatttggatagatttcaggatttcgttggaaacgggaatatcttcatataaaatctcgacagaagcattctcagaaacttctttgtgatatgtgcattcaagtcacaaagttgaatattccctttcacagagtaggtttgaaacactctttttgtagtatctggaagtggacatttggagcgccttgacgcctacggtgaaaagggaaatatcttcccataaaaactagacagaagcaatctcagaatcttctttgggatatatgcacgcagctaacagagttgaacctttctatagacacagcagttttgaaacagtctttctgtggaatctgcaagtggatatttggatagattggaggatttcgttggaaacgggattacgtataaaaagtagacagcagcatcctcagaaacttctttgtgatgtgtgcattcaagtcacagagttgaacattccctttcgtacagcagttttgaaacactctttctgtagtatctggaagtgaacattaggacagcttacaggtctatggtgagaaagggaatatcttcaaataaaaactagacagaagcattctcataaacttgtttgtgatgtgtgagctcagctaacagaggtggatctttcttttgatagagcagttctgaaaaacacattttgttgaatctgcaaatggacatttgtatagatttgaagatttcgttggaaacgggaatatcttcatatcaaatctagacagaggcattctcagaaacgtctttgtgatgtttgcattcaactcatagagttgaacattccctttcagagagcagctttgaagcactctttttgtagtatgtgcaaggggatatttggagcgctctgaggcctaaggtgaaaaagcaaatatcttcccataaccactagacagaaacattttcagaaactcctttatgacgtatgtactcaactaacagagaagaaccttccttttgacagagcagttttgatacactctttttgtaggatctgcaagtggatatttggatagctgtgaagatttcgttggaaacgggaatatcttcctataaaatctagacagaagcattctccgaaactgctctgtgatgtctgcattcaagtcacagagttgaacattgcctttcatagagcaggtttgaaacgctctttttgtagtatatggaagtggacatttcggacggtttgaggcccatggtgataaagggaatatcttcccctacaagctagaaagaaacattctcagaaactcctttatgacgtatgcactcacctaacagagaagaacctaccttttgacagagcagttttcatacactctttttgtagaatctgcgaggggatatttggagagatttcaggatttcgttggaaacgggaatatcttcatataaaatctcgacagaagcattctcagaaacttctttgtgatatctgcattcaagtcacagagttgaatattccctttcacagagtaggtttgaaacactctttttgtagtatctggaagtggacatttggagcgacttgacgcctacggtgaaaagggaaatatcttcccataaaaactagacagaagcaatctcagaatcttccttgggatatctgcacgcagctaacagagttgaacctttctattgacagagcagttttgaaacagtctttctgtggaatctgcaagtggatatttggatagattggaggatttcgttggaaacgggattacgtataaaaagtagacagcagcatcctcagaaacttctttgtgatgtgtgcattcaagtcacagagttgaacattccctttcgtacagcagttttgaaacactctttctgtagtaactggaagtgaacattaggacagctttcagctctatggtgagaaaggaaatatcttcaaataaaaactagacagaagcattctcataaacttgtttgtgatgtgtgaactcagctaacagaggtggatctttcttttgatagagcagttctgaaaaacactttttgttgaatctgcaagtggacattcggatagatttgaagatttcgttggaaacgggaatatcttcatatcaaatctagacagaagcattctcagaaacgtctttgtgatgtttgcattcaactcatagagttgaacattccctttcagagagaagctttgaagcactctttttgtagcatgtgcaagtggacatttggagcgccctgaggcctacggggaaaaagcaaatatcttcccataaccactagacagaaacattctcagaaactcctttatgacgtatgcactcacctaacagagaagaacctttcttttgactgagcagttttgatacactctttttgtagaatctgcaagtggatatttggatagctgtgaagatttcgttggaaacgggaatatcttcctataaaatctagacagaagcattctcagaaactgctctgtgatgtctgcattcaagtcacagagttgaacattgcctttcatagagcaggtttgaaacgctctttttgtagtatatggaagtggatgtttcggacggttggaggcccatggtgataaagggaaaatcttcccctacaagctagaaagaagcattctgtgaaacttgtttgtgatgtgtgtactcaactaacagagttgaacctttctttttacagagcagttttgaaacactctttttgtagaatctgcgaggggatatttggatagatttcaggatttcgttggaaacgggaatatctatcatataaaatctcgacagaagcattctcagaaacttctttgtgatatgtgcattaaagtcacagagttgaatattcgctttcacagagtaggtttgaaacactctttttgtagtatctggaagtggacatttggagcgccttgacgcctacggtgaaaagggaaatatcttcccataaaaactagacagaagcaatctcagaatcttctttgggatatatgcacgcagctaacagagttgaacctttctattgacagagcagttttgaaacactctttctgtggaatctgcaagtggatacttggatagcttggaggatttcattggaaacgggattacgtataaaaagtagacagcagcatcctcagaaacttctttgtgatgtgtgcattgaagtcacagagttgaacattccctttcgtacagcagttttgaaacactctttctttagtatctggaagtgaacaataggacagctttcaggtctatggtgagaaaggaaatatcttcaaataaaaactagacagaagcattctcataaacttgtttgtgatgtgtgaactcagctaacggacgtggatctttcttttgatacagcagttttgaaaaacactttttgttgaatctgcaagtggacatttggatagatatgaagatttcgttggaaacgggaatatcttcatatcaaatctagacagaagcattctcagaaacgtctttgcgatgtttgcattcaactcatagagttgaacattccctttgagagagcagctttgaagcactctttttgtagcatgtgcaagtggacatgtggagcgccctgaggcctacggggaaaaagcaaatatcttcccataaccactagacagaaacattctcagaaactcctttatgacgtatgcactcacctaacagagaagaaccttccttttgacagagcagttttgatacactctttttgtagaatctgcaagtggatatttgggatagctgtgaagatttcgttggaaacgggaatatcttcctataaaatctagacagaagcattctcagaaactgctctgtgatgtctgcattcaagtcacagagttgaacattgcctttcatagagcaggtttgaaatgctctttttgtagtatctggaagtggacgtttcagacggtttgaggccgatggtgataaagggaatatcttcccctacaagctagaaagaagcattctgtgaaacttgtttgtgatgtgtgtactcaactaacagagttgaccctttcttttcacagagcagttttgaaacactctttttgtagaatctgcgaggggatatttggatagatttcaggatttcgttggaaacgggaatatcttcatataaaatctcgacagaagcattctcagaaacttctttgtgatatgtgcattcaagtcacagagttgaatattccctttcacagagtaggtttgaaacactctttttgtagtatctggaagtggacatttggagcgccttgacgcctacggtgaaaagggaaatatcttcacataaaaactagacagaagcaatctcagaatcttctttgggatatatgcacgcagctaacagagttgaacctttctattgacagagtagttttgaaacagtccttctgtggaatctgcaagtggatatttggatagcttggaggatttcgttggaaacgggattacgtataaaaagtagacagcagcatcctcagaaactcctttgtgatgtgtgcattcaagtcacagagttgaacattccctttcgtacagcagttttgaaacactctttctgtagtatctggaagtgaacattaggacagctttcaggtctatggtgagaaaggaaatatcttcaaataaaaactagacggaagcattctcataaacttgtttgtgatgtgtgaactcagctaagagacgtggatctttcttttgatagagcagttctgaaaaacactttttgttgaatctgcaagtggacatttggatagatttgaagatttctttggaaacgggaatatcttcatatcaaatctagacagaagcattctcagaaacgtctttgcgatgtttgcattcaactcatagagttgaacattccctttcagagagcagctttgaggcactctttttgtagtatgtgcaagtggatatttggagcgctctgaggcctacggtgaaaatgcaaatatcttcccataaccactagacagaaacattctgagaaactcctttatgacgtatgcactcacctaacagagaagaaccttccttttgacagagcagttttgatacactctttttgtagaatctgcaagtggatatttggatagctgtgaagatttcgttggaaacgggaatatcttcctataaaatctagacagaagcattctcagaaactgctctgtgatgtctgcattcaagtcacagagttgaacattgcctttcatagagcaggtttgaaacgctctttttgtagtatatggaagtggacttttcggacggtttgaggcccatggtgataaagggaatatcttcccctacaagctagaaagaagaagcattctgtgaaacttgtttgtgatgtgtgtactcaactaacagagttgaacctttcttttcacagagcagttttgaaacactctttttgtagaatctgcgaggggatatttggatagatttcaggatttcgttggaaacgggaatatcttcatacaaaatctcgacagaagcattctcagaaacttcattgtgatatctgcattcaagtcacagagcggaatattccctttcacagagtaggtttgaaacactctttttgtagtatctggaagtggacatttggagcgccttgacacctatggtgaaaagggaaatatcttcccgtaaaaactagacagaagcaatctcagaatcttctttgggatatatgcacgcagctaacagagttgaacctttctattgacagagcagttttgaaacagtctttctgtagaatctgcaagtggatatttggatagcttggaggatttcgttggaaacgggattacgtataaaaagtagacagcagcatcctcagaaacttctttgtgatgtgtgcattcaagtcacagagttgaacattccctttcgtacatcagttttgaaacgctctttctgtagtatctggaagtgaacattaggacagctttcaggtctatggtgagaaaggaaatatcttcaaataaaaactagacagaagcattctcataaacttgtttgtgatgtgtgaactcagctaacagacgtggatctttcttttgatacagcagttttgaaaaacactttttgttgaaatctgcaagtggacatttggatagatttgaagatttcgttggaaacgggaatatcttcatatcaaatctagacagaagcattctcagaaacgtctttgtgatgtttgcattcaactcatagagttgaacattccctttcagagagcagctttgaagcactctttttgtagcatgtgcaagtggacatttggagcgccctgaggcatacggggaaaaagcaaatatcttcccataaccactagacagaaacattctcagaaactcctttatgacgtatgcactcacctaacagaaaagaaccttccttttgacagagcagttttgatacactctttttgtagaatctgaaagtggatatttggagcgctctgaggcctacggtgaaaaagcaaatatcttcccataaccactagacagaagcattctcagaaactgctctgtgatgtctgcattcaagtcacacagttgaacattgcctttcatggagcaggtttgaaacgctctttttgtagtatatggaagtggacgtttcggacggtttgaggcccatggtgataaagggaatatcttcccctacaagctagaaagaagcattctgtgaaacttgtttgtgatgtgtgtactcaactaacagagttgaacctttctttttacagagtagttttgaaacactctttttgtagaatctgcgaggggatatttggaaacatttcagcatttcgttggaaacgggaatatcttcatataaaatctcgacagaagcattctcagaaacttccttgtgatatgtgcattcaagtcacagagttgaatattccctttcacagagtaggtttgaaacactctttttgtagtatctggaagtggacatttggagcgccttgacgcctacggtgaaaagggaaatatcttcccataaaaactagacagaagcaatctcagaatcttctttgggatttatgcacgccgctaacagagttgaacctttctattgacagagcagttttgaaacagtctttctgtggaatctgcaagtggatatttggatagcttggaggatttcgttggaaacgggattacgtataaaaagtagacagcagcatcctcagaaacttctttgtgatgtgtgcattcaagtcacagagttgaacattccctttcgtacagcagttttgaaacactctttctgtagtatctggaagtgaacattaggacagctttcaggtctatggtgagaaaggaaatatcttcaaataaaaactagacggaagcattctcataaacttgtttgtgatgtgtgaactcagctaacagaggtggatctttcttttgatagagcagttctgaaaaacacattttgttgaatctgcaagtggacatttggatagatttgaagatttcgttggaaacgggaatatcttcatatcaaatctagacagaagcattcccagaaacgtctttgtgatgtttgcattcaactcatagagttgaacattccctttcagagagcagctttgaagcactctttttgtaggatttgtaaagggatatttggagcgctctgaggcctaaggtgaaaaagcaaatatcttcccataaccactagacagaaacattctcagaaactcgtttatgacgtatgcactcacctaacagagaagaaccttccatttgacagagcagttttgatacactctttttgtagaatctgcaagtggatatttggatagctgtgaagattttgctggaaacgggaatatcttcctataaaatctagacagaagcattctcagaaactgctctgtgatgtctgcattcaagtcacagagttgaacattgcctttcctagagcaggtttgaaacgctctttttgtagtatatggaagtagacgtttcggacggtttgaggcccatggtgataaagggaatatcttcccctacaagctagaaagaagcattctgtgaaacttgtttgtgatgtgtgtactcaactaatagagttgaaccattctttttacagagcagttttgaaacactctttttgtagaatctgcgaggggatatttggatagatttcaggatttcgttggaaacgggaatatcttcatataaaatctcgacagaagcattctccgaaacctctttgtgatatatgcattgaagttacagagttgaatattccctttcacatagcaggtttgaaacactctttttgtagtatctggaagtggacattgggagcgctttgacgtctatggtgaaaaaggaaatatcttcccataaaaactacacagaggcaatctcagaatcttctttgggatgtatgcatgcagctaacagagttgaacctttctattgacagagcagttttgaaacagtctttttgtggaatctgcaagtggatatttggatagcttggaggatttcattggaaacgggattacatataaaaagtagacagcagcatcctcagaaacttctttgtgatgtgtgcattcaagtcacagagttgaacattccctttcgtacagcagttttgaaacactctttctgtagtatctggaagtgaacattaggacagctttcagctctatggtgagaaaggaaatatcttcaaataaaaactagacaggaagcattctcataaacttgtttgtgatgtctgaactcagctaacagaggtggatctttcttttgatagagcagttctgaaaaacactttttgttgaatctgcaagtggacatttggatagatttgaagatttagttggaaacgggaatatcttcatatcaaatctagacagaagcattctcagaaacgtctttgcgatgtttgcattcaactcatagagttgaacattccgtttcagagagcagctttgaggcactctttttgtagtatgtgcaagtggatatttggagcgctctgaggcctacggtgaaaaagcaaatatcttcccataaccactagacagaaacattctcagaaactcctttatgacgtatgcactcacctaagagagaagaaccttccttttgacagagcagttttgatacactctttttgtagaatctgcaagtggatatttggatagctgtgaagatttcgttggaaacgggaatatcttcctataaaatctacacagaagcattctcagtaactgctctgtgatgtctgcattcaagtcacagagttgaacattgcctttcatagagcaggtttgaaacgctctttttgtagtatatggaagtggatgtttcggacggttggaggcccatggtgataaagggaatatcttcccctacaagctagaaagaagcattctgtgaaacttgtttgtgatgtgtgtactcaaataacagagttgaacctttctttttacagagcagttttgaaacattctttttgtagaatctgcgaggggatatttggatagatttcaggatttcgttggaaacgggaatatcttcatataaaatctcgacagaagcattctcagaaacttctttgtgatatgtgcattcgagtcacagagttgaatattccctttcacagagtaggtttgaaacactctttttgtagtatctggaagtggacatttggagcgccttgacacctacggtgaaaagggaaatatcttcccataaaaactagacagaagcaatctcagaatcttctttgggatatatgcacgcagctaacagagttaaacctttctattgacagagcagttttgaaacagtctttctgtggaatctgcaagtagatatttggatagcttggaggatttcgttggaaacgggattacagatataaaaagctagacagcagcatccacagaaacttccttgtaatgtgtgcattcaagtcacagagttgaacattccctttcgtacagcagttttgaaacactctttctgaagtatctggaagtgaactttaggagagctttcatgtctatagtgagaaaggctatatcttcaaataaaaaatagacagaagcattttcataaacttgtttgtgatgtgtgaactcagctaacagaggtggatctttcttttgatagagcagttctgaaaaacactttttgttgaatctgcaagtggacatttggatagatttgaagatttcgttggaaacgggaatatcttcatatcaaatctagacagaagcattctcagaaacgtctttgtgatgtttgcattcaactcatagagttgaacattccgttacagagagcagctttgaggcactctttttgtagtatgtgcaagtggatatttggagcgctctgaggcctacggtgaaaaagcaaatatcttcccataaccactagacagaaacattctcagaaactgctttatgaagtatgcactcacctaacagagaagaaccttccttttgacagagcagttttgatacactctttttgtagaatctgcaagtggatatttggatagctgtgaagatttcgttggaaacgggaatatcttcctataaaatctagacagaagcattctcagaaactgctctgtgatgtctgcattcaagtcacagagttgaacattgcctttcctagagcaggtttgaaacgctctttttgtagtatatggaagtggacgtttcggacggttttaggtccatggtgataaagggaatatcttcccctacaagctagaaagaagcattctgtgaaacttgtttgtgatgtgtgtactcaactaagagggttgaacctttctttttacagagcagttttgaaacactctttttgtagaatctgcgaggggatatttggatagatttcaggatttcgttggaaacgggaatatcttcatataaaatctcgacagaagcattctcagaaacttctttgtgatatgtgcattcaagtcacagagttgaatattccctttcacagagtaggtttcaaacactctttttgtagtatctggaagtggaaatttggagcgcctcgacgcctacggtgaaaagggaaatatcttcccataaaaactagacagaaggaatctcagaatctgctttgggatatatgcacgcagctaacagagttgaacctttctattgacagagcagttttgaaacagtctttctgtggaatctgcaagtggatatttagatagcttggaggatttcgttggtaacgggattacgtataaaaattagacagcagcatcctcagaaacttctttgtgatgtgtgcattcaagtcacagagttgaacattccctttcgtacagcagttttgaaccactctttctgtagtatctggaagtgaacattaggaaagctttcaggtctatggtgagaaaggaaatatcttcaaataaaaactagacagaagcattctcattaacttgtttgtgatgtgtgaactcagctaacagaggtggatctttcttttgatagagcagttctgaaaaacattttttgttgaatctgcaggtggacatttggatagatttgaagatttcgttggaaacgggaatatcttcatatcaaatctagacagaagcattctcagaaacgtctttgtgatgtttgcattcaactcatagagttgaacattccctttcagagagcagctttgaagcactctttttgtagcatgtgcaagtggacatttggagggccctgaggcctacggggaaaaagcaaatatcttcccataaccactagacagaaacattctcagaaactcctttatgacgtatgcactcacctaacagagaagaaccttccttttgacagagcagtttcgatacactctttttgtagaatctgcaagtggatatttggatagctgtgaagatttcgttggaaacgggaatatcttcctataaaatctagacagaaagcattctcagaaactgctctgtgatgtctgcattcaagtcacagagttgaacattgcctttcatagagcaggtttgaaacgctctttttgtagtatatggaagtggatgtttcggacggtttgaggcccatggtgataaagggaatatcttcccctacaagctagaaagaagcattctgtgaaacttgtttgtgatgtgtgtactcaactaacagagttgaacctttctttttacagagcagttttgaaacactctttttgtagaatctgcaaggggatatttggatagatttcaggatttcgttggaaacgggaatatcttcatataaaatctcgacagaagcattctcagaagcttcgttgtgatatgtgcattcaagtcacagagttgaatattccctttcacagagtaggtttgaaacacactttttgtagtatctggaagtggacatttggagcgccttgatgcctacggtgaaaagggaaatatcttctcataaaaagtagacagaagcaatctcagaatcttctttgggatatatgcacgcagctaacagagttgaacctttctattgacagagcagttttgaaacagtctttctgtggaatctgcaagtggatatttggatagcttggaggttttctttagaaacgggattacgtataaaaagtagactgcagcctcctcagaaacttctttgtgatgtgtgtattcaagtcacagagttgaacattccctttcgtacagcagttttgaaacactctttctgtagtatctggaagtgaacattaggacagctttcaggtctatggtgagaaaggaaatatcttcaaataaaaactagacagaagcattctgataaacttgtttgtgaagtgtgaactcagctaacagagttggatctttctttcgacacagcagttttgaaaaacactttttgttgaatctgcaagtagacatttggatagatttgaagatttcgttgaaaacgggaatatgttcatttcaaatctagacagaagcattctcagaaacgtctttgtgatgtttgcattcaactcatagagttgaacattccctttcagagagcagctttgaagcactgtttttgtagtatgtgcaagtggacatttggagcgctttgagccctacggggaaaaagcaaatatcttcccgtaaccactagacagaaacattctcagaaactcctttatgatgtatgcactcacctaacagagaagaaccttccttttgacagagcagttttgatacactctttttgtagaatctgcaagtggatatttggatagctgtgaagatttcgttggaaacagggaatatcttcctataaaatctagacagaagcattctcagaaactgctctgtgatgtctgtattcaagtcacagagttgaacattgcctttcatagagcaggtttgaaacgctctttgtgtagtatatggaagtggatgtttcggacggttggaggcccatggtgataaagggaatatcttcccctacaagctagaaagaagcattctgtgaaacttgtttgtgatgtgtgtactcaactaacagagttgaacctttctttttacagagcagttttgaaacactatttttgtagaatctgcgaggggatatttggatagatttcaggatttctttggaaacgggaatatcttcatataaaatctcgacagaagcattctcagaagcttctttgtgatatgtgcattcaagtcacagagttcaatattccctttcacagagtaggtttgaaacactctttttgtagtatctggaagtggacatttggagcgccttgacgcctacggtgaaaagggaaatatcttctcataaaaagtagacagaagcaatctcagaatcttctttgggatatatgcacgctgctaacagagttgaacctttctattgacagagcagttttgaaacagtctttctgtggaatctgcaagtggatatttggatagcttggaggatttcgttggaaacgggattacgtataaaaattagacagcagcatcctcagaaacttctttgtgatgtgtgcattcaagtcacagagttgaacattccctttcgtacagcagttatgaaacactctttctgtagtatctggaagtgaacattaggacagctttcaggtctatggtgagaaaggaaatatcttcaaataaaaactagacagaagcattctcataaacttgtttgtgatgtgtgaactcagctaacagaggtggatctttcttttgatagagcagttctgaaaaacacgttttgttgaatctgcaagtggacatttggatagatttgaagatttcgttggaaacgggaatatcgtcatatcaaatctagaaagaagcattctcagaaacgtctttgtgatgtttgcattcaactcatagagttgaacattccgtttcagagaccagctttgaagcactctttttgtagtatgtgcaagtggatatttggagcgctctgaggcctacggtgaaaaagcaaatatcttcccataaccactagacagaaacattctcagaaactcctttatgaagtatgtactcaactaacagagaagaaccttccttttgacagagcagttttgatacactctttttgcagaatctgcaagtggatatttggatagctgtgaagatttcgttggaaacgggaatatcttcctataaaatctagacagaagcattctcagaaactgctctgtgatgtctgcattcaactcacagagttgaacattgcctttcatagagcaggtttgaaacactctttttgtagcatatggaagtggacgtttcggacggtttgaggcccatggtgataaagggaatatcttcccctacaagctagaaagaagcattctgtgaaacttgtttgtgatgtgtgtactcaactaacagagttgaacctttctttttacagagcagttttgaaacactctttttgtagaatctgcgaggggatatttggatagatttcaggatttcgttggaaaggggaatatcttcatataaaatctcgacagaagcattctcagaaacttctttgtgatatctgcattcaagtcacagagttgaatattccctttcacagagtaggtttgaaacactctttttgtagtgtctggaagtgggcatttggagcgctttgacgcctacggtgaaaagggaaatatcttcccataaaaactagacagaagcaatctcagaatcttctttgggatatatgcacgcagctaacagagttgaacctttctattggcagagcagttttgaaacagtctttctgtggaatctgcaagtggatatttggatagcttggaggatttcgttggaaacgggattaagtataaaaagtagacagcagcatcctcagaaacttctttgtgatgtgtgcattcaagtcacagagttgaacattccctttcgtacagcagttttgaaacactctttctgtagtaactggaagtgaactttaggacagctttcaggtctatggtgagaaaggaaatatcttcaaataaaaactagacagaagcattctcataaacttgtttgtgatgtgttaactcagctaacagaggtggatctttcttttgatagagcagttctgaaaaacactttttgttgaatctgcaagtggacatttggatagatttgaagatttctttggaaacgggaataccttcatatcaaatctagacagaagcattctcagaaacgtctttgtgatgtttgcattcaactcatagagttgaacattccgtttcagagagcagctttgaggcactctttttgtagtatgtgcaagtggatatttggagcgcctctgaggcctacggtgaaaaagcaaatatcttcccataaccactagacagaaacattctcagaaactcctttatgacgtatgcactcacctaacagagaagaaccttccttttgaaagagcagttttgatacactctttttgtagaatctgcaagtggatacttggatagctgtgaagatttcgttggaaacgggaatatcttcctataaaatctagacagaagcattctcagaaactgctctgtgatgtctgcattcaagtcacagagttgaacattgcctttcatagagcaggtttgaaacgctctttttgtagtatatggaagtggacttatcggacggtttgaggcccatggtgataaagggaatatcttcccctacaagctagaaagaagcattctgtgaaacttgtttgtgatgtgtgtactcaactaacagagttgaacctttctttttaaagagcagttttgaaacactctttttgtagaatctgcgaggggatatttggatagatttcagcatttcgttggaaacgggaatatcttcatataaaatctcgacagaagcattctcagaaacttctttgtgatatgtgcattcaagtcacagagttgaatattccctttcacagagtaggtttgaaacactctttttgtagtatctggaagtggacatttggagcgccttgacgcctacggtgaaaagggaaatatcttcccataaaaactagacagaagcaatctcagaatcttctttgggatatatgcacgcagctaacagagttgaacctttctattgacagagcagttttgaaacagtctttctgtggaatctgcaagtggatatttggatagctaggaggatttctttggaaacgagattacgtataaaaagtagacagcagcatcctcagaaacttctttgtgatgtgtgcattcaagtcacagagttgaacattccctttcgtacaacagttttgaaacactctttctgcagtatctggaagtgaacattaggacagctttcaggtctatggtgagaaaggaaatatcttcaaataaaaactagacagaagcattctcataaacttgtttgtgatgtgtgaactcagctaacacacgtggatctttcttttgatagagcagttctgaaaaacaatttttgttgaatctgcaagtggacatttggatagatttgaagatttccttggaaacgggaatatcttcatatcaaatctagacagaagcattctcagaaacgtctttgcgatgtttgcattcaactcatagagttgaacattccgtttcagagaacagctttgaggcactctttttgtagtatgtgcaagtggatatttggagcgctctgaggcctacggtgaaaaagcaaatatcttcccataaccactagacagaaacattctcagaaactcctttatgacgtatgcactcacctaacagagaagaacctttcttttgacagagcagttttgatacactctttttgtagaatctgcaagtggatatttggatagctgtgaagatttcgttggaaacgggaatatcttcctataaaatctagacagaagcattctcagaaactgctctgtgatgtctgcattcaagtcacagagttgaacattgcctttcatagagcaggtttgaaacgctctttttgtagtatatggaagtggatgtttcggacggttggaggcccatggtgataaagggaatatcttccgctacaagctagaaagaagcattgtgtgaaacttgtttgtgatgtgtgtactcaactaacagagttgaacgtttgtttttacagagcagttttgaaacactctttgtgtagaatctgcgaggggatatttggatacatttcaggatttcgttggaaacgggaatatcttcatataaaatctcgacagaagcattctcagaagcttctttgtgatatgtgcattcaagtcacagagttgaatattccctttcacagagtaggtttgaagcactctttttgtagtatctggaagtggacatttggagcgccttgacgcctacggtgaaaagggaaatatcttctcataaaaagtagacagaagcaatctcagaatcttctttgggatatatgcacgcagctaacagagttgaacctttctattgacatagcagttttgaaacagtctttctgtggaatctgcaagtggatatttggatagcttggaggatttcgttggaaacgggattacgtataaaaagtacacagcagcatcctcagaaacttccttgtgatgtgtgcattcaagtcacagagttgaacattccctttcgtacagcagttttgaaacactctttctgtagtatctggaagtgaacattaggacagctttcaggtctatggtgagaaaggaaatatcttcaaataaaaactagacagaagcattctcataaacttgtttgtgatgtgtgaactgagctaacagaggtggatctttcttttgatagagcagttctgaaaaacactttttgttgaatctgcaagtggacatttggatagatttgaagatttcgttggaaacgggaatatcttcatatcaaatctagacagaagcattctcagaaacgtctttgtgatgtttgcattcaactcatagagttgaacattccctttcagagagcggctttgaagcactctttttgtagcatgtgcaagtggacatttggagggccctgaggcctacggggaaaaagcaaatatcttcccataaccactagacagaaacattctcagaaactcctttaaacgtatgcacacacctaacagagaagaaccttccttttgacagagcagttttgatacactctttttgtagaatctgcaagtggatatttggatagctgtgaagatttcgttggaaacgggaatatcttcctataaaatctagacagaagcattctcagaaagtgctctgtgatgtctgcattcaagtcacagagttgaacattgcctttcatagagcaggtttgaaacactctttttgtagtatatggaagtggacgtttcggacggtttgaggcccatggtgataaagggaatatcttcccctacaagctagaaagaagcattctgtgaaacttgtttgtgatgtgtgtactcaactaacagacttgaacctttctttttacagagcagtattgaaacactctttttgaagaatctgcgaggggatatttggatagatttcaggatttcgttggaaacgggaatatcttcatataaaatctcgacagaagcattctcagaaacttccttgtgatatgtgcattcaagtcacagagttgaatatttcctttcacagagtaggtttgaaacactctttttgtagtatctggaagtggacatttggagcgccttgacgcctacggtgaaaagggaaatatcttcccataaaaactagacagaagcaatttcagaatcttctttgggatatatgtacgcagctaatagagttgaacctttctattgacagagcagttttgaaacagtctttctgtggaatctgcaagtggatatttggatagcttggaggatttcgttggaaacgggattacgtataaaaagtagacagcagcatcctcagaaacttctttgtgatgtgtgcattcaagtcacagagttgaacattccctttcatacagcagttttgaaacactctttctgtagtatctggaagtgaactttaagagagctttcaggtatatagtgagaaaggatatatcttcaaataaaaactagacagaagcattctcataaacttgttcgtgatgtgtgaactcagctaacacacgtggatctttcttttgatagagcagttctgaaaaaccctttttgttgaatctgcaagaggacatttggatagatttgaagatttcgttggaaacgggaatatcttcatatcaaatctagacagaagcattctcagaaacgtctttgtgatgtttcaattaaactcatggagttgaacattccctttcagagagtagctttgaagcactctttttgtagtatgtgcaagtagatatttggagcgctctgaggcctacggggaaaaagcaaatatcttcccataaccactagacagaaacattctcagaaactcctttatgacgtatgcactcacctaacagagaagaaccttccttttgacagagcacttttgatacactctttttgtagaatctgaaagtggatatttggatagctgtgaagatttcgttggaaacgggaatatcttcctataaaatctagacagaagcattctcagaaactgctctgtgatgtctgcattcaagtcacagagttgaacattgcctttcatagagcaggtttgaaacgctctttttgtagtatatggaagtggacttttcggacggtttgaggcccatggtgataaagggaatatcttcccctacaaagctagaaagaagcattctgtgaaacttgtttgtgatgtgtgtactcaactaacagagttgaacctttctttttacagagcagttttgaaatactctttttgtagaatctgcgaggggatatttggatagatttcaggatttcgttggaaacgggaatatcttaatataaaatctcgacagaagcattctcagaaactgctctgtgatgtctgcattcaagtcacagagttgaatattccctttcacagagtaggtttgaaacactctttttgtagtatctggaagtggacattttgagcgccttgacacctatggtgaaaagggaaatatcttcccataaaaactagacagaaacaatctcagaatcttctttgggatatatgcacgcagctaacagagttgaacctttctattgacagagcagttttgaaacagtctttctgtggaatctgcaagtggatatttggatagcttggaggatttcgttggaaacgggattaggtataaaaagtagacagcagcatcctcagaaacttctttgtgatgtgtgcattcaagtcacagagttgaatattccttttcgtacagcagttttgaaaaactctttctgtagtatctggaagtgaacattaggacagcattcaggtctatggtgagaaaggaaatatcttcaaataaaaactacacagaagcattctcataaacttgtttgtgatgtgtgaactcagctaacagaggtggatctttcttttgatagagcagttctgaaaaacactttttgttgaatctgcaagtggacctttggatagatttgaagatttcgttggaaacgggaatatcttcatatcaaatctagacagaagcattctcagaaacgtctttgtgatgtttgcattcaactcatagagttgaacattccctttcagagagcagctttgaagcactctttttgtagtatgtgcaagtggatatttggagcgctctgaggcctacggtgaaaaagcaaatatcttcccataaccactagacagaaacattctcagaaactcctttatgacgtatgcactcacctaacagtagaagaaccttccttttgacagagcagttttgatacactctttttgtagaatctgcaagtggatatttggatagctgtgaagatttcgttggaaacgggaatatcttcctataaaatctagacagaagcattctcagaaactgctctgtgatgtctgcattcaagtcacagagttgaacattgcctttcatagagcaggtttgaaacgctctttttgtagtatatggaagtggaagtttcggtcggtttgaggcccatggtgataaagggaatatcttcccctacaagctagaaagaagcattgtgtgaaacttgtttgtgatgtgtgtactcaactaacagagttgaacctttctttttacagagcagttttgaaacactctttttgtagaatctgcgaggggatatttggatacatttcaggatttccttggaaacgggaatatcttcatataaaatgtcgacagaagcattctcagaaacttcattgtgatatctgcattcaagtcacacagttgaatattccctttcacagagtaggtttgaaacactctttttgtagtatctgtaagtggacatttggagcgccttgacacctacggtgaaaagggaaatatcttcccataaaaactagacagaagcaatctcagaatcttctttgggatatatgcacgcagctaacagagttgaacctttctattgacagagcagttttgaaacagtctttctgtggaatctgcaagtggatatttggatagcttggaggatttcgttggaaacgggattacgtataaaaagtagccagcagcatcctcagaaacttctttgtgatgtgtgcattcaagtcacagagttgaacattccctttcgtacagcagttttgaaacactctttctgtagtatctggaagtgaacattaggacagctttcaggtctatggtgagaaaggaaatatcttcaaataaaaactggacagaagcattctgataaacttgtttgtgaagtgtgaactcagctaacagaggtggatctttcctttgatagagcaattctgaaaaacactttgttgaatctgcaagtggacatttggatagatttgaagatttcgttggaaacgggaatatcttcatatcaaatctagacagaagcattctcagaaacgtctttgcgatgtttgcattcaactcatagagttgaacattccgtttcagagagcagctttgaggcactctttttgtagtatgtgcaagtggatatttggagcgctctgaggccttcggtgaaaaagcaaatatcttcccataaccactagacagaaacattctcagaaactcctttatgacgtatgcactcacctaaaagagaagaaccttccttttgacagagcagttttgatacactctttttgtagaatctgcaagtggatatttggatagctgtgaagatttcgttggaaacgggaatatcttcctataaaatctagacagaagcattctcagaaactgctctgtgatgtctgcattcaagtcacagagttgaacattgtctttcatagagcaggtttgaagcgttctttttgtactatatggaagtggacgtttcggacggtttgaggcccatggtgataaagggaatatcttcccctacaagctagaaagaagcattctgtgaaacttgtttgtgatgtgtgtactcaactaacagagttgaacctttctttttacagagcagttttgaaacactctttttgtagaatctgcgaggggatatttggatagatttcaggatttcgttggaaaggggattatcttcatataaaatctcgacagaagcattctcagaagcttctttgtgatatgtgcattcaagtcacagagttgaatattccctttcacagagtaggtttgaaacactctttttgtagtatctggaagtggacatttggagcgccttgacgcctacggtgaaaagggaaatatcttctcataaaaagtagacagaagcaatctcagaatcttctttgggatatatgcacgcagctaacagagttgaacctttctattgacagagcagttttgaaacagtctttctgtggaatctgcaagtggatatttggatagcttggaggatttcgttggaaacgggattacgtataaaaagaagacagcagcatcctcagaaacatctttgtgatgtgggcattcaagtcacaaagttgaacattccctttcgtacagcagttttgaaacactctttctgtagtatctggaagtgaacattaggacagctttcaggtctatggtgagaaaggaaatatcttcaaataaaaactagacagaagcattctcataaacttgtttgtgatgtgtgaactcagctaacagaggtggatctttcttttgatagagcagttctgaaaaacactttttgttgaatctgcaagtggacatttggatagatttgaagatttcgttggaaacgggaatatcttcatatcaaatgctagacagaagcattctcagaaacgtctctgtgatgtttgcattcaactcatagagttgaacattccgtttcagagagcagctttgaggcactctttttgtagtatgtgcaagtggatatttggagcgctctgaggcctacggtgaaaaagcaaatatcttcccataaccactagacagaaacattctcagaaactcctttatgacgtatgcactcacctaacagagaagaaccttccttttgacagagcagttttgatacactctttttgtagaatctgcaagtggatatttggatagctgtgaagatttcgttggaaacgggaatatcttcctataaaatctacacagaagcattctcaggaactgctctgtgatgtctgcattcaagtcacagagttgaacattgcctttcctagagcaggtttgaaacgctctttttgtagtatatggaagtggacgtttcggacgttttgaggcccatggtgatgaagggaatatcatcccctacaagctagaaagaagcattctgtgaaacttgtttgtgatgtgtgtactcaactaacagagttgaacctttctttttacagagcagttttgaaacactcttcttgtagaatctgcgaggggatatttggatagatttcaggattttgttggaaacgggaatatcttaatataaaattctcgacagaagcattctcagaaacttctttgtgatatgtgcattcaagtcacagagttgaatattccctttcaccgagtaggtttgaaacactctttttgtagtatctggaagtggacatttggagcgccttgacacctacggtgaaaagggaaatatcttcccataaaaactagacagaagcaatctcagaatcttctttgggatatatgtacgcagctaatagagttgaacctttctattgacagagcagttttgaaacagtctttctgtggaatctgcaagtggatatttggatagcttggaggatttcgttggaaacgggattacgtataaaaagtagacagcagcatcctcagaaacatccttgtgatgtgtgcattccagtcacagagttgaacattcccgttcgtacagcagttttgaaacactctttctgtagtatctggaagtgaactttaggagagctttcaggtctatagtgagaaaggatatatcttcaaataaaaactagacagaagcattctcattaacttgtttgtgatgtgtgaactcagctaacagaggtggatctttcttttgatagagcagttctgaaaaacattttttgttgaatctgcaagtggacatttggatagatttgaagatttcgttggaaacgggaatatcttcatatcaaatctagacagaagcattctcagaaacgtctttgtgatgtttgcattcaactcatagagttgaacattccctttcagagagcagctttgaagcactctttttgtagcatgtgcaagtggacatttggagggccctgaggcatacggggaaaaagcaaatatcttcccataaccactagacagaaacattctcagaaactcctttatgacgtatgcactcacctaacagagaagaaccttccttttgacagagcagttttgatacactctttttgtagaatctgcaagtggatatttggatagctgtgaagatttcgttggaaactggaatatcttcctataaaatctagacagaagcattctcagaaactgctctgtgatgtctgcattcaagtcacagagttgaacattgcctttcatagagcaggtttgaaacgctctttttgtagtatatggaagtggacttttcggacggtttgaggcccatggtgataaagggaatatcttcccctacaagctagaaagaagcattgtgtgaaacttgtttgtgatgtgtgtactcaactaagagagttgaacctttctttttacagagcagttttgaaacactctttttgtagaatctgcgaggggatatttggatagatttcaggatttcgttggaaacgggaatatcttcatataaaatctcgacagaagcattctcagaaacttctttgtaatatgtgcattcaagtcacagagttgaatattccctttcacagagtaggtttgaaacactctttttgtagtatctggaagtggacatttggagcgccttgacgcctacggtgaaaagggaaatatcttcccataaaaactagacagaagtaatctcagaatcttctttgggatatatgcacgcagctaacagagttgaacctttctattgacagagcagttttgaaacagtctttctgtggaatctgcaagtggatatttggatagcttggaggatttcgttggaaacgggattaagtataaaaagtagacagcagcatcctcagaatcttctttgtgatgtgtgcattcaagtcacagagttgaacattccctttcgtacagcagtgttgaaacactctttctgtagtatctggaagtgaacattaggacagctttcaggtctatggtgagaaaggaaatatcttcaaataaaaactagacagaagcattctcataaacttctttgtgatgtgtgaactcagctaagagacgtggatctttcttttgatagagcagttctgaaaaacactttttgttgaatctgcaagtggacatttggatagatttgaagatttcgttggaaacgggaataacttcatttcaaatctagacagaagcattctcagaaatgtctttgtgatgtttgcattcaacccatagagttgaacattccctttcagagagcagctttgaagcactctttttgtagtatgtgcaaggggatatttggagcgctctgaggcctaaggtgaaaaatcaaatatcttcccataaccactagacagaaacattctcagaaactcctttatgacgtatgcactcacctaacagaaaagaaccttccttttgacagagcagttttgatacactctttttgtggaatctgcaagtggatatttggatagctgtgaagatttcgttggaaacgggaatatcttcctacaaaatctagacagaagcattctcagaaactgctctgtgatgtctgcattcaagtcacagcagttgaacattgcctttcctagagcaggtttgaaacgctctttttgtagtatatggaagtggacgtttcggacggtttgaggcccatggtgataaagggaatatcttcccctacaagctagaaagaagcattctgtgaaacttgtttgtgatgtgtgtactgaagtaacagagttgaacctttctttttacagagcagttttgaaacactctttttgtagaatctgcgaggggatatttggatagatttcaggatttcgttggaaacgggaatatctttatagaaaatctcgacagaagcattctcagaaacttctttgtgatatgtgcattcaagtcacagagttgaatattcactttcacagagtaggtttgaaacactccttttgtagtatctggaagtggacatttggagcgccttgacgcctacggtgaaaagggaaatatcttcccataaaaactagacagaagcaatctcagaatcttctttgggatatatgcacgcagctaacagagttgaacctttccattgacagagcagttttgaaacagtctttctgtggaatctgcaagtggatatttggataccttggaggatttcgttggaaacgggattacgtataaaaagtagacagcaacatcctcagaaacttctttgtgatgtgtgcattcaagtcacagagttgaacattccctttcgtacagcagttttgaaacactctttctgtagtatctggaagtgaacattaggacagctttcagctctatggtgagaaaggaaatatcttcaaataaaaactagacagaagcattctcataaacttgtttgtgatgtgtgaactcagctaacagaggtggatctttcttttgatagagcagttctgaaaaacactttttgttgaatctgcaagtggacatttggatagatttgaagatttcgttggaaacgggaatatcttcaatatcaaatctagacagaagcattctcagaaacgtctttgtgatgtttgcattcaactcatagagtggaacattccctttcagagagcagctttgaagcactctttttgtagtatgtgcaagtggatatttggagcgctctgaggcctacggtgaaaaagcaaatatcttcccataaccactagacagaaacattctcagaaactcctttatgacgtatgtactcaactaacagagaagaaccttccttttgacagagcagttttgatacactctttttgtagaatctgcaagtggatatttgtatagctgtgaagatttcgttggaaacgggaatatcttcctataaaatctagacagaagcattctcagaaactgctctgtgatgtctgcattcaagtcacagagttgaacattgcctttcatagagcaggtttgaaatgctctttttgtagtatatggaagtggacgtttcagacagtttgaggcccatggtgataaagggaatatcttcccctacaagctagaaagaagcattctgtgaaacttgtttgtgatgtgtgtactcaactaacagagttgaacttttctttttacagagcagttttgaaacactctttttgtagaatctgcgaggggatatttggatagatttcagaatttcgttggaaacgggaatatcttcatataaaatctcgacagaagcattctcagaaacttctttgtgatatgtgcattcaagtcacagagttgaatattccctttcacagagtaggtttgaaacactctttttgtagtatctggaagtggacatttggagcgccttgacgcctacggtgaaaagggaaatatcttcccatcaaaactagacagaagcaatctcagcaatcttctttgtgatatatgcacgcagctaacagagttgaacctttctattgactgagcagatttgaaacagtctttctgtggaatctgcaagtggatatttggatagattggaggatttcgttggaaacgggattacgtataaaaagtacacagcagcatcctcagaaacttccttgtgatgtgtgcattcaattcacagagttgaacattccctttcgtacagcagttttgaaacactctgtagtatctggaagtgaacattaggacagctttcagctctatggtgagaaacgaaatatcttcaaataaaaactagacagaagcattctcataaacttgtttgtgatgtgtgaactcagctaacagaggtggatctttcttttgatagagcagttctgaaaaacactttttgttgaatctgcaagtggacatttggatagatttgaagatttcgttggaaacgggaacatcttcatatcaaatctagacagaagcattctcagaaacgtctttgtgatgtttgcattcaactcatagagttgaacattccctttcagagagcagctttgaggcactctttttgtagtatgtgcaagtggatatttggagcgctctgaggcctacggtgaaaatgcaaatatcttcccataaccactagacagaaacattctcagaaactcctttatgacgtatgcactcaactaacagaaaagaaccttccttttgacagagcagttttgatacactctttttgtagaatctgcaagtggatatttgggtagctgtgaagatttcgttggaaacgggaatatcttcctataaaatctagacagaagcattctcagaaactgctctgtgatgtctgcattcaagtcacagagttgaacattgcctttcctagagcaggtttgaaacgctctttttgtagtatatggaagtggacgattcggacggtttgaggcccatggtgataaagggaatatcttcccctacaagctagaaagaagcattctgtgaaacttgtttgtgatgtgtgtactcaactaacagagttgaacctttctttttacagagcagttttgaaacactctttttgtagaatctgcgaggggatattttgatagatttcaggatttcgttggaaacgggaatatcttcctataaaatctcgacagaagcattctcagaaacttctttgtgacatgtgcattcaagtcacagagttgaatattccctttcacagagtaggtttgaaacactctttttgtagtatctggaagtggacatttggagcgccttgacgcctacggtgaaaagggaaatatcttcccataaaaactagacagaagcaatctcagaatcttctttgggatatatgcacgcagctaacagagttgaacctttctattaacagagcagttttgaaacagtctttctgtggaatctgcaagtggatatttggatagcttggaggatttcgttggaaacgggattacgtataaaaagtagacagcagcctcctcagaaacttctttgtgatgtgtgcattcaagtcacagagttgaacattccctttcgtacagcagttttgaaacactctttctgtagtatctggaagtgaacattagtacagctttcaggtctatggtgagaaaggcaatatcttcaaataaaaactagacagaagcattctcataaacttgtttgtgatgtgtgaactcagctaacagaggtggatctttcttttgatagagcagttctgaaaaacactttttgttgaatctgcaagtggagatttggatagatttgaagatttcgttggaaacgggaatatcttcatatcaaatctagacagaagcattctcagaaacgtctttgtgatgtttgcattcaactcatagagttgaacattccctttcagagagcagctttgaagcactctttttgtagcatgtgcaagtggacatttggagcgccctgaggcctacggggaaaaagcaaatatcttcccataaccactagacagaaacattctcagaaactcctttatgacgtatgcactcacctaacagagaagaaccttgcttttgacagagcagttttgatacactctttttgtagcatctgcaagtggatatttggatagctgtgaagatttcgttggaaacgggaatatcttcctataaaatctagacagaagcattctcagaaactgctctgtgatgtctgcattcaagtcacagagttgaacattgcctttcatagagcaggtttgaaacgctctttttgtagtatatggaagtggacttttcggacggtttgaggcccatggtgataaagggaatatcttcccctgcaagctagaaagaagcattctgtgaaacttgtattgtgaggtgtgtactcaactaacagagttgaacttttctttttacagagcagttttgaaacactctttttgtagaatctgcgaggggatatttggatagatttcaggatttcgttggaaaggggaatatcttcatataaaatctcgacagaagcattctgagaaacctctttgtgatacctgcactcaagtcacagagttgaatattccctttcacagagtaggtttgaaacactctttttgtagtatttggaagtggacatttggagcgccttgacgcctacggtgaaaaaggaaatatgaaatatcttcccataaatactagacagaagcaatctcagaatcttctttgggatgtatgcacccagctaacagagttgaaactttctattgacagagcagttttgaaacagtcttttagtggaatctgcaagtggatattttgatagcttggaggatttctttggaaacgggattatgtatacaaagtagacagcagcatcctcagaaacttctttgtgatgtgtgcattcaagtcacagagttgaacattccttttcgtacagcagttttgaaacactctttctgtagtatctggaagtgaacattatgacagctttcaggtctatggtgagaaaggaaatatcttcaaataaaaacgagacagaagcattctcataaacttgtttgtgatgtgtgaactcagctaacacacgtggatctttcttttgatagagcagttctgaaaaacaatttttgtagaatctgcaagtggacatttggatagatttgaagatttccttggaaacgggaatatcttcatatcaaatctagacagaagcattctcagaaacgtctttgtgatgtttgcattcaactcatagagttgaacattccgtttcagagagcagctttgaagcactctttttgtagtatgtgcaagtggatatttggagcgctctgaggcctacggggaaaaagcaaatatcttcccataaccactagacagaaacattctcagaaactgctttatgacgtatgtactcaactaacagagaagaaccttccttttgacagagcagttttgatacactctttttgtagaatctgcaagtgcatatttggatagctgtgaagatttcgttggaaacgggaatatcttcctataaaatctagacagaagcattctcagaaactgctctgtgatgtctgcattcaagtcacagagttgaacattgcctttcctagagcaggtttgaaacgctctttttgtagtatatggaagtggacgtttcggacgctttgaggcccatggtgataaagggaatatcttcccctacaagctagaaagaagcattctgtgaaacttgtttgtgatgtgtgtactcaactaacagagttgaacctttctttttacagagcagttttgaaacactctttttgtagaatctgcgaggggatatttggatacatttcagaatttcgttggaaacgggaatatcttcatataaaatctcgacagaaacattctcagaaacttccttgtgatatgtgcattcaagtcacagacttgaatattccctttcacagagtaggtttgaaacactctttttgtagtatctggaagtggacatttggagcgccttgacgcctacggtgaaaagggaaatatcttcccataaaaactagacagaagcaatctcagaatcttctttgggatatatgcacgcagctaacagagttgaacctttctattgacacagcagttttgaaacagtctttctgtggaatctgcaagtggatatttggatagcttggaggatttcgttggaaacgggattacgtataaaaagtagacagcagcatcctcagaaacttctttgtgatgtgtgcattcaagtcacagagttgaacattccctttcgtacagcagttttgaaacactctttctgtagtatctgaagtgaacaataggacagctttcaggtctatgatgagaaaggaaatatcttcaaataaaaactagacagaagcattctcataaacttgtttgtgatgtgtgaactcagcaaacagaggtggatctttcttttgatagagcagttctgaaaaacactttttgttgaatctgcaagtggacatttggatagatttgaagatttcgttcgaaacgggaatatcttcatatcaaatctagacagaagcattctcagaaaggtctttgtgatgtttgcattcaacccatagagttgaacattccgtttcagagagcagctttgaagcactctttttgtagtatgtgcaaggggatattttgagcgctttgaggcctaaggtgaaaaagcaaatatcttcccataaccactagacagaaacattctcagaaactcctttatgacgtatgtactcaactaacagagaagaaccttccttttgacagagcagttttgatacactctttttgtagaatctgcaagtggatatttggatagctgtgaagatttcgttggaaacgggaatatcttcctataaaatgccagacagaagcattctcagaaactgctctgtgatgtctgcattcaagtcacagagttgaacattgcctttcatagagcaggtttgaaacgctctttttgtagtatatgtaagtggatgtttcggacggttggaggcccatggtgataaagggaatatcttcccctacaagctagaaagaagcattctgtgaaacttgtttgtgatgtgtgtactcaactaacagagttgaacctttctttttacagagcagttttgaaacactctttttgtagaatctgcgaggggatatttggatacatttcagcatttcgttggaaacgggaatatcttcatataaaatctcgacagaagcattctcagaaacttccttgtgatatgtgcattcaagtcacagagttgaatattccctttcacagagtaggtttgaaacactctttttgtagtatctggaagtgcacatttggagcgccttgacgcccacggtgaaaagggaaatatcttcccataaaaactagacagaagcaatctcagcaatcttctttgggatatatgcacgcagctaacagagttgaacctttctattgacagagcagttttgaaacagtctttctgtggaatctgcaagtggatatttggatagcttggaggatttcgttggaaacgggattacgtatataaagtagaccacagcatcctcagaaacttctttgtgatgtgtgcattcaagtcacagagttgaacattccctttcgtacagcagttttgaaacactctttctgtagtatctggaagtgtacattaggacagctttcaggtctatggtgagaaaggagatatcttcaaataaaaactagacagaagcattctcataaacttgtttgtgatgtgtgaactcagctaacagaggtggatctttcttttgatagagcagttctgaaaaacacgttttgttgaatctgcaaggggacatttggatagatttgaagatgtcgttggaaacgggaatatcttcatatcaaatctagacagaagcattctcggaaacgtctttgtgatgtttgcattcaactcagagagttgaacattccgtttcagagagcagctttgaagcactctttttgtagtatgtgcaagtggatatttggagcgctctgaggcctacggtgaaaaagcaaatatcttcccataaccactagacagaaacattctcagaaactcctttatgacgtatgcactcacctaacagagaagaaccttccttttgacagagcagttttgatacactctttttgtagaatctgcaagtggatatttggatagctgtgaagatttcgttggaaacgggaatatcttcctataaaatctagacaataacattctcaggaactgctctgtgatgtctgcattcaagtcacagagttgaacattgcctttcctagagcaaatttgaaacgctctttttgtagtatatggaagtggacgtttcggacggtttgaggcccatggtgataaagggaatatcttcccctacaagctagaaagaagcattctgtgaaacttgtttgtgatgtgtgtactcaactaacagagttgaacctttctttttacagagcagttttgaaacactctttttgtagaatctgcgaggggatatttggatagatttcaggatttcgttggaaacgggaatatcttaatataaaatctcgacagaagcattctcagaaacttctttgtgatatctgcattcaagtcacagagttgaatattccctttcacagagtaggtttgaaacactctttttgtagtatctggaagtggacatttggagcgccgtgacgcctacggtgaaaaggaaaatatcttcccataaaaactagacagaaggaatctcagaatcttctttgggatatatgcacgcagctaacagagttgaacctttctattgacagagcagttttgaaacagtctttctgtggaatctgcaagtggatatttggatagcttggaggatttcgttggaaacgggattacgtataaaaagtagacagcagcatcctcagaaacttctttgtgatgtgtgcattcaagtcacagatttgaacattccctttcgtacagcagttttgaaacactctttctgtcgtatctggaagtgaacattaggacagctttcagctctatggtgagaaaggaaatatcttcaaataaaaactagacagaagcattctcataaacttgtttgtgatgtgtgaactcagctaacagaggtgaatctttcttttgatagagcagttctgaaaaacactttttgttgaatctgcaagtggacatttggatagatttgaagatttcgttggaaacgggaatatcttcatatcaaatctagacagaagcattctcagaaacgtctttgtgatgtttgcattcaagtcatagagttgaacattccgtttcagagagcagctttgaagcactctttttgtagtatgtgcaagtggatatttggagcgctctgagacctacgggtgaaaaagcaaatatcttcccataaccactagacagaaacattctcagaaactcctttatgacgtatgtactcaactaacagaggagaaccttccttttgacagagcagttttgatacactctttttgtagaatctgcaagtggatatttggatagcttggaagatttcgttggaaaagggaatatcttcctataaaacctagacaaaagcattctcagaaactgctctgtgatgtctgcattcaagtcacagagttgaacattgcctttcatagagcaggtttgaaacgctctttttgtagtatatggaagtggacttatcggacggttggaggcccatggtgataaagggaatatcttcccctacaagctagaaagaagcattctgtgaaacttgtttgtgatgtgtgtactcaactaacagagttgaacctttctttttacagagcagttttgaaacattctttttgtagaatctgcgaggggatatttggatagatttcaggatttcgttggaaacgggaatatcttcatataaaatctcgacagaagcattctcagaaacttctttgtgatatgtgcattcaagtcacagagttgaatattccctttcacagagtaggtttgaaacactctttttgtagtatctggaagtggacatttggagcgccttgacacctacggtgaaaagggaaatatcttcccataaaaactagacagaagcaatctcagaatcttctttgggatatatgcacgcagctcacaaagttgaacctttctattgacagagcagttttgaaacagtctttctgtggaatctgcaagtggatatttggatagcttggaggatttcgttggaaacgggattacgtataaaaattagacagcagcatcctcagaaacatccttgtgatgtgtgcattcaagtcacagagttgaacattccctttcgtacagcagttttgaaacactctttctgtagtatctggaagtgaactttaggacagctttcaggtctatagtgagaaaggttatatcttcaaataaaaactagacagaagcattctgataaacttgtttgtgaagtgtgatctcagctaacagaggtggatctttcttttgatagagcagttctgaaaaacactttgttgaatctgcaagtggacatttggatagatttgaagatttcgttgtaaacgggaatatcttcatatcaaatctagacagaagcagtctcagaaacgtctttgtgatgtttgcattcaactcatagagttgaacattccgtttcagagagcagctttgaagcactctttttgtagtatgtgcaagtggatatttggagcgctctgaggcctacggtgaaaaagcaaatatcttcccttaaccactagacagaaacattctcagaaactcctttatgacgtatgtactcaactaacagaagaagaaccttccttttgacagagcagttttgatacactctttttgtagaatctgcaagtggatatttggatagctgtgaagatttcgttggaaacgggaatatcttcctataaaatctagacagaagcattctcagaaactgctctgtgatgtgtgcattcaagtcacagagttgaacattgcctttcatagagcaggtttgaaacgctcttttttgtagtatatggaagtggacgtttcggacggtttgaggcccatggtgataaagggaatatcttcccctaccagctagaaagaagcattctgtgaaacttgtttgtgatgtgtgtactcaactaacagagttgaacctttctttttacagagcagttttgaaacactctttttgtagaatctgcgtggggatatttggatagatatcaggatttccttggaaacgggaatatcttctttgaaaatctcggcagaagcattctcagaaacttcattgtgatatctgcattcaagtcacagagttgaatattccctttcacagagtaggtttgaaacactctttttgtagtatctggaagtggacatttggagcgccttgacacctacggtgaaaagggaaatatcttcccataaaagctagacagaagcaatctcagaatcttctttgggatatatgcacgcagctaacagagttgaacatttctattgacagagcagttttgaaacagtctttctgtggaatctgcaagtggatatttggatagcttggaggatttcgttggaaacgggattacgtataaaaagtagacagcagcatcctcagaaacttctttgtgatgtgtgcattcaagtcacagagttgaacattccctttcgtacagcagttttgaaacactctttctgtagtatctggaagtgaacattaggacagctttcagctctgtggtgaaaaaggaaatatcttcaaataaaaactagacagaagcattctcataaacttgtttgtgatgtgtgaactcagctaacagacgtggatctttcttttgatagagcagttttgaaaaaccctttttgttgaatctgcaagtggacatttggatagatttgaagatttcgttggaaacgggaatatcttcatatcaaatctagacagaagcattctcagaaacgtctttgtgatgtttgcattcaactcatagagttgaacattccgtttcagagagcagctttgaagcactctttttgtagtatgtgcaagtggatatttggagcgctgtgaagcctacggtgaaaaagcaaatatcttcccataaccactagacagaaacattctcagaaattcctttatgacgtatgtactcaagtaacagagaagaaccttccttttgacagagcagttttgataaactctttttgtagaatctgcaagtggatatttggatagctgtgaagatttcgttggaaacgggaatatcttcctataaaatctagacagaagcattctcagaaactgctctgtgatgtctgcattcaagtcacagagttgaacattgcctttcatagagcaggtttgaaacactctttttttagtatatggaagtggacgtttcggacggtttgaggcccatggtgataaaggaaatatcttcccctacaagctagaaagaagcattctgtgaaacttgtttgtgaagtgtgtactcaagtaacagagttgaacctttctttttacagagcagttttgaaacactctttttgtagaatctgcgaggggatatttggatagatttcaggatttcgttggaaacgggaatatcttcatataaaatctcgacagaagcattctcagaaacttctttgtgatatgtgcattcaagtcacagagttgaatattccctttcacagagtacgtttgaaacactctttttgtagtatctggaagtggacatttggagcgccttgacgcctacggtgaaaagggaaatatcttcccataaaaactagacagaagcaatctcagaatcttctttgggatatatgcacgcagctaacagagttgaacctttctattgacagagcagctttgaaacagtctttctgtggaatctgcaagtggatatttggatagcttggaggatttcgttggaaacgggattacgtataaaaagtagacagcagcatcctcagaaacttctttgtgatgtgtgcattcaagtcacagagttgaacattccctttcgtacagcagttttgaaacactctttctgtagtatctggaagtgaacattaggacagctttcagctctatggtgagaaaggaaatattttcaaataaaaactagacagaagcattctcataaacttgtttgtgatgtgtgaactcagctaacagaggtggatctttcttttgatagagcagttctgaaaaacactttttgttgaatctgcaagtggacatttggatagatttgaagatttccttggaaacgggaatatcttcatatcaaatctagacagaagaattctcagaaacgtctttgtgatgtttgcattcaactcatagagttcaacattccctttcagagagcagctttgaagcactctttttgtagtatgtgcaagtggatatttggagcgctctgaggcctacggtgaaaaatcaaatatcttcccataaccactagacagaaacattctcagaaactcctttatgacgtatgcactcacctaacagaaaagaaccttccttttgacagagcagttttgatacactctttttgtagaatctgcaagtggatatttggatagctgtgaagatttcgttggaaacgggaatatcttcctataaaatctagacagaagcattctcagaaactgctctgtgatgtctgcattcaagtcacagagttgaacattgcctttcctagagcaggtttgaaacgctctttttgtagtatatggaagttgacgtttcggaaggtttgaggcccatggtgataaagggaatatcttcccctacaagctagaaagaagcattctgtgaaacttgtttgtgatatgtgtactcaactaacagagttgaacctttctttttacagagcagttttgaaacactctttctgtagaatctgcgaggggatatttggatagatttcaggatttcgttggaaacgggaatatcttcatataaaatctcgacagaagcattctcagaaacttctttgtgatatgtgcattcaagtcacagagttgaatattccctttcacagagtaggtttgaaacactctttttgtagtatctggaagtggacatttggagcgccttgacgcctatggtgaaaagggaaatatcttcccatgaaaactagacagaagcaatatcagaatcttctttgggatatatgcacgcagctaacagagttgaacctttctattgacagagcagttttgaaacagtctttctgtggaatctgcaagtggatatttggatagcttggaggatttctttggaaacgggattacgtataaaaagtagacagcagcatcctcagaaacatccttgtgatgtgtgcattcaagtcacagaagttgaacattccctttcgaacagcagttttgaaacactctttctgtagtatctggaagtgaactttaggagagctttcaggtctatagtgagaaaggatatatcttcaaataaaaactagacagaagcattctgataaacttgtttgtgaagtgtgatctcagctaacagaggtggatctttcttttgatagagcagttctgaaaaacgctttgttgaatctgcaagtggacatttggatagatttgaagatttcgttggaaacgggaatatcttcatatcaaatctagacagaagcattctcagaaacgtctttgcgatgtttgcattcaactcatagagttgaacattccctttcagagaccagctttgaagcactctttttgtagtatgtgcaagtggatatttggagcgctctgaggcctacggtgaaaaagcaaatatcttcccataaccactagacagaaacattctcagaaacttctttatgacgtatgtactcaagtagcagagaagaactttccttttgaccgagcatttttgatacactctttttgtactatctgcaagtggatatttggatagctgtgaagatttcgttggaaacgggaatatcttcctataaagtctggacagaagcattctcagaaactgctctgtgatgtctgcattcaagtcacagagttgaacattgcctttcatagagcaggtttgaaacactctttttttagtatatggaagtggacgtttcggacggtttgaggaccatggtgataaaggaaatatcttcccctacaagctagaaagaagcattctgtgaaacttgtttgtgatgtgtgtactcaactaacagagttgaacctttctttttacagatcagtgttgaaacactctttttgtggaatctgcgaggggatatttggatagatttcaggatttcgttggaaacgggaatatcttcatataaaatctcgacggaagcattctcagaaacttctttgtgacatctgcctttaagtcacagagttgaatattccctttcacagagtaggtttgaaacactctttttgtagtatctggaagtggacatttggagcgccttgacacctacggtgaaaagggaaatatcttcccataaaaactagacagaagcaatctcagaatcttctttgggatatatgcacacagctaacagagttgaacctttctattgacagagcagttttgaaacagtctttctgtggaatctgcaagtggatatttggatagcttggaggatttcgttggaaacgggattaagtataaaaagtagacagcagcatcctcagaaacttctttgtgatgtgtgcattcaagtcacagagttgaatattccctttcgtacagcagttttgaaacactctttctgtagcatctggaagtgaacattaggacagctttcaggtctatggtgagaaaggaaatatcttcaaataaaaactagacagaagcattctcataaacttgtttgtgatgtgtgaactcagctaacagaggtgtatctttcctttgatagagcagttctgaaaaacacgttttgttgaatctgcaagtggacattttgatagatttgaagatttcgttgcaaacgggaatatcttcatatcaaagctagacagaagcattctcagaaacgtctttgtgatgtttgcattcaactcatagagttgaacattccctttcagagagcagctttgaagcactctttttaagtatgtgcaagtggacatttggagcgctttgaggcctacggggaaaaagtaaatatcttaccataacccctagacagaaacattctcagaaacttctttatcacgtatgtactcaactaaaacagaagaaccttccttttgagagagcagttttgatacactccattggagaatctgcaagtggatatttggatagctgtgaagaattcgttggaaacgggaataccttcctataaaatctagacagaagcattctcagaaactgctctgtgatgtctgcattcaagtcacagtagttgaacattgtctttcatagagcaggtttgaagcgctctttttgtagtatatggaagtggacgtttcggacggtttgaggcccatggtgataaagggaatatcttcccctacaagctagaaagaagcattctgtgaaacttgtttgtgatgtgtgtactcaactaacagagttgaacctttctttttacagagcagttttgaaacactctttttgtagaatctgcgaggggatatttggagagatttcaggattttgttggaaacggaaatatcttcatataaaatctcgacagaagcattctcagaaacttccttgtgatatgtgcattcaagtcacagagttgaatgttccctttcacagagtaggtttgaaacactctttttgtagtatctggaaatggacatttggagcgccttgacgcctacggtgaaaagggaaatatcttcccatcaaaactagacagaagcaatctcagaatcttctttgggatatatgcacgcagctaacagagttgaacctttctattgacagagcagttttgaaacagtctttctgtggaatctgcaagtggatatttggatagcttggagtatttcgttggaaacgggattaagtataaaaagtagacagcagcatcctcagaaacttctttgtgatgtgtgcattcaagtcacagagttgaacattccctttcgtacagcagttttgaaacactctttctgtagtaactggaactgaacattaggacagctttcaggtctatggtgagaaaggaaatatcttcaaataaaaactagacagaagcattctcataaacttgtttgtgatgtgtgaactcagcttagagacgtggatctttcttttgatagagcagttctgaaaaacacgttttgttgaatctgcaagtggacatttggatagatttgaagatttcgttggaaacgggaatatcttcatatcaaatctagacagaagcattctcagaaacgtctttgtgatgtttgcattcaactcatagagttgaacattccgtttcagagagcagctttgaagcactctttttgtagtatctgcaagtggatatttggagcgctctgaggcctacggtgaaaaagcaaatatcttcccataaccgctagacagaaacattctcagaaactcctttatgacgtatgtactcaactaagagagaagaaccttccttttgacagagcagttttgatacactctttttgtagaatctgcaagtggatatttggatagctgtgaagatttcgttgcaaacgggaatatcttcctataaaatctagacagaagcattctcagaaactgctctgtgatgtctgcattcaagtcacagagttcaacattgcctttcatagagcaggtttgaaacgctctttttgtagtatatggaagtggacgtttcggacggtttgaggcccatggtgataaagggaatatcttcccctacaagctagaaagaagcattctgtgaaacttgtttgtgatgtgtgtactcaactaacagagttgaacctttctttttacagagcagtgttgaaacactctttttgtggaatctgcgaggggatatttggatagatttcaggatttcgttggaaacgggaatatcttcatataaaatctcgacggaagcattctcagaaacttctttgtgatatctgcattgaagtcacagagttgaatattcccttccacagagtaggtttgaaagactctttttgtagtatctggaagtggacatttggagcgccttgacgcctacggtgaaaagggaaatatcttcccataaaaactagacagaagcaatctcagtaatcttctttgggatatatgtacgcagctaacagagttgaacctttctattgacagagcagttttgaaacagtctttctgtggaatctgcaagtggatatttggatagcttggaggatttcgttggaaacgggattacgtataaaaagtagacagccgcatcctcagaaacttctttgtgatgtgtgcattcaagtcacagagttgaacattccctttcgtacagcagttttgaaacactctttctgtagtatctggaagtgaacattaggacagctttcaggtctatggtgagaaaggaaatatcttcaaataaaaactagacagaagcattctgataaacttgtttgtgaagtgtgatctcagctaacagaggtggatctttcttttgatagagcagttctgaagaacactttgttgaatctggaagtggacatttggatagatttgaagatttcgttggaaacgggaatatcttcatatcaaatctagacagaagcattctcagaaacgtctttgtgatgtttgcattcaactcatagagttgaacattccgtttcagagagcagctttgaagcactctttttgtagtatgtgcaagtggatatttggagcgctctgaggcctacggtgaaaaagcaaatatcttcccataaccactagacagaagcattctcagaaactcctttatgacgtatgcactcacctaacagaaaagaaccttccttttgacagagcagttttgatacactctttttgtagaatctgcaagtggatatttggatagctgtgaagatttcgttggaaacgggaatatcttcctataaaatactagacagaagcattctcagaaactgctctgtgatgtctgcattcaagtcacagagttgaacattgcctttcctagaacaggtttgaaacgctctttttgtagtatatggaagtggacgtttcggacggtttgaggcccatggtgataaagggaatatcttcccctacaagctagaaggaagcattctgtgaaacttgtttgtgatgtgtgtactcaactaacagagttgaacctttcttttcacagagcagttttgaaacactctttttgtagaatctgcgaggggaaatttggatagaattcaggatttcgttggaaacgggaatatcttcatacaaaatctcgacagaagcattctcaaaaacttctttgtgatatgtgcattcaagtcacagagttgaatattccctttcacagagtaggtttgaaacactctttttgtagtatctggaagtggacatttggagcgccttgacacctaccgtgaaaagggaaatatcttcccataaaaactagacagaagcaatctcagaatcttctttgggatatatgcacgcagctaacagagttgaacctttctattgacagagcagttttgaaacagtctttctgtggaatctgcaagtggatatttggatagcttggaggatttcgttggaaacgggattacgtataaaaagtagacagcagcatcctcagaaacttctttgtgatgtgtgcattcaagtcacagagttgaacattccttttcgtacagcagttttgaaacactctttctgtagtacctggaagtgaacattaggacagctttcagctctatggtgagaaaggaaatatcttcaaataaaaactagacagaaagcattctcataaacttgtttgtgatgtgtgaactcagctaacagaggtggatctttcttttgatacagcagttttgaaaaacactttttgttgaatccgcaagtggacatttggatagatttgaagatttcattggaaacgggaatatcttcatatcaaatctagacagaagcattctcagaaacgtctttgtgatgtttgcattcaactcatagagttgaacattccgtttcagagagcagctttgaagctctctttttgtagtatgtgcaagtggatatttggagcgctctgaggcctacggtgaaaaagcaaatatcttcccataaccactagacagaaacattctcagaaactcctttatgacgtatgcactcacctaactgagaagaaccttcctcttgacagagcagttttgatacactctttttgtagaatctgcaagtggatatttggatagctgtgaagatttcgttgaaaacgggaatatcttcctataaaatctagacagaagcattctcagaaactgctctgtgatgtctgcattcaagtcacagagttgaacattgcctttcatagagcaggtttgaaacgctcttttcgtagtatatggaagtggacgtttcggacggtttgaggcccatggtgataaagtgaatatcttcccctaccagctagaaggaagcattctgtgaaacttgtttgtgatgtgtgtactcaactaacagagttgaaccttccttttcacagagcagttttgaaacactctttttgtagaatctgcgaggggatatttggatagatttcaggatttcgttggaaacgggaatatcttcatataaaatctcgacagaagcattctcagaaacttctttgtgatatctgcattcaaatcactgagttgaatattccctttcacagagtaggtttgaaacactctttttgtagtatctggaagtggacatttggagcgccttgacgcctacggtgaaaagggaaatatcttcccataaaaactagacagaagcaatctcagaatcttctttgggatatatggacacagctaacagagttgaacctttctattgacagagcagttttgaaacagtctttctgtggaatctgcaagtggatatttggatagcttggaggatttcgttggaaacgggattacgtataaaaagtagacagcagcatcctcagaaacttctttgtgatgtgtgcattcaagttacagagttgaacattccctttcgtacagcagttttgaaacactctttctgtagtatctggaagtgaacattaggacagctttcaggtctatggtgagaaaggaaatatcttcaaataaaaactagacagaagcattctcataaacttgttcgtgatgtgtgaactcagctaacacacgtcgatcattcttttgatagagcagttctgaaaaacactttttgttgaatctgcaagaggacatttggatagatttgaagatttcgttggaaacgggaatatcttcatatcaaatctagacagaagcattctcagaaacgtctttgtgatgtttgcattcaactcatagagttgaacattccgtttcagagagcaggtttgaagcactctttttgtagtatgtgcaagtggatatttggagcgctctgaggcctacggtgaaaaagcaaatatcttcccataaccactagacagaaacattctcagaaactcctttatgacgtatgcactcacctaacagagaagaaccttccttttgacagagcagttttgatacactctttttgtagaatctgcaagtggatatttggatacctgtgaagatttcgttggaaacgggaatatcttcctataaaatctatacagaagcattctcagaaactgctctgtgatgtctgcattcaagtcacagagttgaacattgcctttcatagagcaggtttgaaatgctctttttgtagtatatggaagtggacgtttcggacggtttgaggaccatggtgataaagggaatatcttcccctacaagctagaaagaagcattctgtgaaacttgtttgtgatgtgtgtactcaactaacagagttgaacctttctttttacagagcagttttgaaacactctttttgtagaatctgcgaggggatatttggatacatttcaggatttcgttggaaacgggaatatcttcatataaaatctcgacagaagcattctcagaaacttctttgtgatatgtgcattcaagtcacagagttgaatattccctttcacggagtaggtttgaaacactctttttgtagtatctggaagtggacatttggagcgccttgacgcctacggtgaaaagggaaatatcttcccataaaaactagacagaagcaatctcagaatcttctttgggatatatgcacgcagctaacagagttgaacctttctattgacagagcagttttgaaacagtctttctgtggaatctgcaagtggatatttggatagcttggaggatttcgttggaaacgggattacgtatcaaaagtagacagcagcatcctcagaaacttctttgtgatgtgtgcattcaagtcacagagttgaacattccctttcgtacagcagttttgaaacactctttctgtagtatctggaagtgaacattaggacagctttcaggtctatggtgagaaaggaaatatcttcaaataaaaaccagacagaagcattctcataaacttgtttgtgatgtgtgaactcagctaacacacgtggatctttcttttgatagagcagttctgaaaaacactttttgttgaatctgcaagtggacatttggatagatttgaagatttcgttggaaacgggaatatcttcatatcaaatctagacagaagcattctcagaaacgtctttgtgatgtttgcattcaactcatagagttgaacattccctttcagagagcagctttgaagcactctttttgtagtatgtgcaagtggatatttggagcgctctgaggcctacggtgaaaaagcaaatatcatcccataaccactagacagaagcattctgataaacttgtttgtgaagtgtgaactcagctaacggaggtggatttttcttttgatagagcagttctgaaaaacactttttgttgaatctgcaagtggacatttggatagatttgaagatttcgttggaaacgggaatatcttcatatcaaatctagacagaagcattctcagaaactgctctgtgatgtctgcattcaagtcacagagttgaacattgcctttcatagagcaggtttgaaacgctctttttgtagtatatggaagtggacgtttcggacggtttgaggcccatggtgataaagggaatatcttcccctacaagctagaaagaagcattctgtgaaacttgtttgtgatgtgtgtactcaactaacagagttgaacctttgtttttacagagcagttttgaaacactctttttgtagaatctgcgaggggatatttggatacatttcaacatttcgttggaaacgggaatatcttcatataaaatctcgacagaagcattctcagaaacttccttgtgatatgtgcattcaagtcacagagttgaatattccctttcacagagtaggtttgaaacactctttttgtagtatctggaagtggacatttggagcgccttgacacctacggtgaaaagggaaatatcttcccataaaaactagacagaagcaatctcagaatcttctttgggatatatgcacgcagctaacagagttgaacctttctattgacagagcagttttgaaacagtctttctgtggaatctgcaagtggatatttggatagcttggaggatttcgttgaaaacgggattacgtataaaaagtagacagcagcatcctcagaaacttctttgtgatgtgtgcattcaagtcacagagttgaacattccgtttcatacagcagttttgaaacactctttctgtagtatctggaagtaaacattacgacagctttcaggtctatggtgagaaaggaaatatcttcaaataaaaactagacagaagcattctcataaacttgtttgtgatgtgtgaactcagctaacagaggtggatctttcttttgatagagcaattctgaaaaacactttttgttgaatctgcaagtggacatttggatagatttgaagatttcgttggaaacgggaatatcttcatatcaaatctagacagaagcattctcagaaacgtctttgcgatgtttgcattcaactcatagagttgaacattccgtttcagagagcagctttgaggcactctttttgtagtatgtgcaagtggatatttggagcgctctgaggcctacggtgaaaaagcaaatatcttcctataaccactaacagaaacattctcagaaactcctttatgacgtatgcactcacctaacagaaaagaaccttccttttgacagagcagttttgatacactctttttctagaatctgcaagaggatatttggatagctgtgaagatttcgttggaaacgggaatatcttcctataaaatctagacagaaagcattctcagaaactgctctgtgatgtctgcattcaagtcacagagttgaacattgcctttcgtagagcaggtttgaaacgctctttttgtagtatatggaagtggacgtttcggacggtttgaggcccatggtgataaagggaatatcttcccctacaagctagaaagaagcattctgtgaaacttgtttgtgatgtgtgtactcaactaacagagttgaacctttctttttgcagagcagttttgaaacactctttttgtagaatctgcgaggggaaatttggatagatttcaggatttcgttggaaacgggaatatcttcatacaaaatctcgacagaagcattctcagaaacttctttatgatatctgcattcaagtcacagagttgaatattccctttcacagagtaggtttgaaacactctttttatagtatctggaagtggacatttggagcgccttgacccctacggtgaaaagggaaatatcttcccataaaaactagacagaagcaatctcagaattttctttgggatatatgcacacagctaacagagttgaacttttctattgacatagcagttttgaaacagtctttctgtggaatctgcaagtggatatttggatagcttggaggatttcgttggaaatgggattacgtataaaaagtagacagcagcatcctcagaaacttctttgtgatgtgtgcattcaagtcacagagttgaacattccctttcgtgcagcagttttgaaacactctttctgtagtaactggaagtgaacattaggacagctttcaggtctatggtgagaaaggaaatatcttcaaataaaaactagacagaagcattctcataaacttgtttgtgatgtgtgaactcagctaagagaggtggatctttcttttgatagaacagttctgaaaaacactttttgttgaatctgcaagtggacatttggatagatttgaagatttcgttggaaacgggaatatcttcatatcaaatctagacagaagcattctcagaaacgtctttgcgatgtttgcattcaactcatagagttgaacattccgtttcagagagcagctttgaggcactctttttgtagtatgtgcaagtggatatttggagcgctctgaggcctaaggtgaaaaagcaaatatcttcccataaccactagacagaaacattctcagaaactcctttatgacgtatgcactcacctaacagagaagaaccttccttttgacagagcagttttgatacactctttttgtagaatctgcaagtggatatttggatagctgtgaagatttcgttggaaacgggaatatcttcctataaaatgctagacagaagcattctccgaaactgctctgagatgtctgcattcaagtcacagagttgaacattgcctttcatagagcaggtttcaaacactctttttttagtatatggaagtggatgtttcggacggtttgaggaccatggtgataaaggaaatatcttcccctacatgctagaaagaagcattctgtgaaacttgtttgtgatgtgtgtactcaactaacagagttgaacctttctttttacagagcagttttgaaacactctttttgtagaatctgcgtggggatatttggatagatttcaggatttcgttggaaacgggaatatcttcatataaaatctcgacagaagcattctcagaaacttctttgtgatatgtgcattcaagtcacagagttgaatattccctttcacagagtaggtttgaaacactctttttgtagtatctggaagtggacatttggagcgccttgacgcctacggtgaaaagggaaatatcttcccatgaaaactagacagaagcaatctcagaatcttctttgggatatatgcacgcagctaacagagttgaacctttctattgacagagcagttttgaaacagtctttctgtggaatctgcaagtggatatttggatagcttggaggatttcgttggaaacgggattacgtataaaaagtagaaagccagcatcctcagaaacttctttgtgatgtgtgcattcaagtcacagagttgaacattccttttcgtacagcagttttgaaacactctttctgtagtatctggaagtgaacattaggacagctttcagctctatggtgagaaaggaaatatcttcaaataaaaactagacagagcattctcctaaacttgtttgtgatgtgtgaactcagctaacagacgtggatctttcttttgatacagcagttttgaaaaacacattttgttgaatctgcaagtggacatttggatagatttgaagatttcgttggaaacgggaatatcttcatatcaaatctagacagaagcattctcagaaacgtctttgcgatgtttgcattcaactcatagagttgaacattccgtttcagagagcagctttgaggcactctttttgtagtatgtgcaagtggatatttggagcgctctgaggcctacggtgaaaaagcaaatatctttccataaccactagacagaaacattctcagaaacttctttatgacgtatgtactcaactagcagagaagaactttccttttgacagagcatttttgatacactctttttgtagtatctgcaagtggatatttggatagctgtgaagatatcgttggaaacgggaatatcttcctataaagtctggacagaagcattctcagaaactgctctgtgatgtctgcattcaagtcacagagttgaacattgcctttcatagagcaggtttgaaacactctttttgtagtatttggaagtggacgtttcggacggtttgaggcccatggtgataaagggaatatcttcccctacaagctagaaagaagcattctgtgaaacttgtttgtgatgtgtgtactcaactaacagagttgaacctttcttttcacagagcagttttgaaacactctttttgtagaatctgcgaggggatatttcgatagatttcagcatttcgttggaaacgggaatatcttcatataaaatctcgacagaagcattctcagaaacttctttgtgatatgtgcattcaggtcacagagttgaatattccctttcacagagtaggtttgaaacactctttttgtagtatctggaagtggacatttggagcgccttgacacctacggtgaaaagggaaatatcttcccataaaaactagacagaagcaatctcagaatcttctttgggatatatgcacgcagctaacagagttgaacctttctattgactgagcagatttgaaacagtctttctgtggaatctgcaagtggatatttggatagattggtggatttcgttggaaacgggattacgtataaaaagtagacagcagcatcctcagaaacttctttgtgatgtgtgcattcaagtcacagagttgaacattccctttcgtacagcagttttgaaacactctttctgtagtatctggaagtgaacattaggacagctttcaggtctatggtgagaaaggaaatatcttcaaataaaaactagacagaagcattttcataaacttgtttgtgatgtgtgaactcagctaacagaggtggatctttcttttgatagagcagttctgaaaaacactttttgttgaatctgcaagtggacatttggatagctttgaagatttcgttggaaacgggaatatcttcatatcaaatctagacagaagcattctcagaaacgtctttgtgatgttcgcattcaactcatagagttgaacattccgtttcagagagcaggtttgaagcactctttttgtagtatgtgcaagtggatatttggagcgctctgaggcctacggtgaaaaagcaaatatcttcccataaccactagacagaaacattctcagaaactcctttatgacgtatgtactcaactaacagagaagaaccttccttttgacagagcagttttgatacactctttttgtagaatctgcaagtggatatttggatagctgtgaagatttcgttggatacgggaatatcttcctataaaatctagacagaagcattctcagaacctgctctttgatgtctgcattcaagtcacagagttgaacattgcctttcctagagcaggtttgaaacgctctttttgtagtatatggaagtggacgtttcggacggtttgaggcccatggtgataaagggaatatcttcccctacaagctagaaagaagcattctgtgaaacttgtttgtgatgtgtgtactcaactaacagagttgaacctttctttttacagagcagttttgaaacactctttttgtagaatctgcgaggggatatttgaatagatttcaggatttcgttggaaacgggaatatcttcatagaaaatctcgacagaagcattctcagaaacttctttgtgatatctccctttaagtcacagagttgaatattccctttcacagagtaggtttgaaacactctttttgtagtatctggaagtggacatttggagcgccttgacacctacggtgaaaagggaaatatcttcccataaaaactagacagaagcaatctcagaatcttctttgggatatatgcacgcagctaacagagttgaacctttctattgacagagcagttttgaaacagtcttactgtggaatctgcaagtggatatttggatagcttggaggatatctttggaaacgggattacgtataaaaagtagacagcagcatcctcagaaacttctttgtgatgtgtgcattcaagtcacagagttgaacattccctttcgtacagcagttttgaaacactctttctgtagtatctggaagtgaacattaggacagctttcagctctatggtgagaaaggaaatatcttcaaataaaaactagacagaagcattctcataaacttgtttgtgaggtgtgaactcagctaacagaggtggatcttacttttgatagagcagttctgaaaaacactttttgttgaatctgcaagtggacatttggatacatttgaagatttcgttggaaacgggaatatcttcatatcaaatctagacagaagcattctcagaaacgtctttgcgatgtttgcattcaactcatagagttgcacattccgtttcagagagcagctttgaggcactctttttgtagtatgtgcaagtggatatttggagccctctgaggcctacggtgaaaaagcaaatatcttcccataaccactagacagaaaacattctcagaaactcctttatgacgtatgcactcacctaacagagaagaaccttccttttgacagagcagttttgatacactctttttgtagaatctgcaagtggatatttggatacctgtgaagatttcgttggaaacgggaatatcttcctataaaatctagacagaagcattctcagaaactgctctgtgatgtctgcattcaagtcacagagttgaacattgcctttcatagagcaggtttgaaacgctctttttgtactatatggaagtagacgtttcggacggtttgaggcccatggtgataaagggaatatcttcccctgcaagctagaaagaagcattctgtgaaacttgtttgtgatgtgtgtacttaactaacagagttgaacctttctttttacagagcagtgttgaaacactctttttgtagaatctgcgaggggatatttggatagatttcaggatttcgttggaaacgggaatatcttcatataaaatctcgacagaagcattctcagaaacttctttgtgatatctgcattcaagtcacagagttgaatattcccttccacagagtaggtttgaaacactctttttgtagtatctggaagtggacatttggagcgccttgacgcctacggtgaaaagggaaatatcttcccataaaaactagacagaagcaatctcagaatcttctttgggatatatgcacgcagctaacagagttgaacctttctattgacagagcagttttgaaacagtctttctgtggaatctgcaagtggatatttggatagcttggaggatttcgttggaaacgggattaagtataaaaagtatacagcagcatcctcagaaacttctttgtgatgtgtgcattcaagtcacagagttgaacattccctttcgtacagcagttttgaaacactctttctgtagtatctggaagtgaatattaggacagctttcagctctatggtgagaaaggaaatatcttcaaataaaaactagacagaagcattctgataaacttgtttgtgaagtgtgaactcagctaacagaggtggatctttcttttgatagagcagttctgaaaaacactttgttgaatctgcaagtggatatttggatagatttgaagatttcgttggaaacgggaatatcttcatatcaaatctagacagaagcattctcagaaacgtctttgtgatgtttgcattcaactcatagagttgaacattcccttccagagagtagctttgaagcactctttttgtagcatgtgcaagtggacatttggagcgccctgaggcctacggggaaaaagaaaatatcttcccataaccactagacagaaacattctcagaaactcctttatgacgtatgcactcaactaacagaaaagaaccttccttttgacagagcagttttgatacactctttttgtagaatctgcaagtggatattaggatagctgtgaagatttcgttggaaacgggaatatcttcctataaaatctagacagaagcattctcagaaactgctctgtgatgtctgcattcaagtcacagagttgaacattgcctttcatagagcaggtttgaaacgctctttttgtagtatatggaagtggatgtttcggacggttggaggcccatggtgataaagggaatatcttcccctacaagctagaaagaagcattctgtgaaacttgtttgtgatgtgtgtactcaactaacagagttgaacctttctttttacagagcagttttgaaacactctttttgtagaatctgcgaggggatatttggatagatttcaggatttcgttggaaacggaaatatctttatataaaatctcgacagaagcattctcagaaacttctttgtgatatgtgcattcaagtcacagagttgaatattccctttcacagagtaggtttgaaacactctttttgtagtatctggaagtggacatttggagcgccttgacgcctatggtgaaaagggaaatatcttcccataaaaactagacagaagcaatctcagaatcttctttgggatatatgcacgcagctaacagagttgaacctttctattgacagagcagttttgaaacagtctttctgtggaaactgcaagtggatatttggatagcttggaggatttcgttggaaacgggattacgtataaaaagtagacagcagcatcctcagaaacatccttgtgatgtgtgcattcacgtcacagagttgaacattccctttcgtacagcagttttgaaacactgtttctgtagtatctggaagtgaactttaggacagctttcaggtctatagtgagaaaggatatatcttcaaataaaaactagacagaagcattctgataaacttgtttgtgaagtgtgatctcagctaacagaggtggatctttcttttgatagagcagttctgaaaaacactttgttgaatctgcaagtggacatttggatagatttcaagatttcgttggaaacgggaatatcttcatatcaaatctagacagaagcattctcagaaacgtctttgtgatgtttgcattcaattcatagagttgaacattccgtttcagagagcagctttgaggcactctttttgtagtatgtgcaagtggatatttggagcgctctgaggcctaaggtgaaaaagcaaatatcttcccataaccactagacagaaacattctcagaaacttctttatgacgtaagtactcaactaaaacagaagaaccttccttttgacagagcagttttgatacactccattggagaatctgcaagtggatatttggatagctgtgaagatttcgttggaaacgggaataccttcctataaagtctagacagaagcattctcagaaactgctctgtgatgtctgcattcaagtcacagagttgaacattgcctttcgtagagcaggtttgaaacgctctttttgtagtatatggaagtggatgtttcggacggttggaggcccatggtgataaagggaatatcttcccctacaagctagaaagaagcattctgtgaaacttgtttgtgatgagtgtactcaactaacagagttgaacctttctttttacagagcagttttgaaacactctttttgtagaatctgcgaggggatatttggatacatttcaggatttcgttggaaacgggaatatcttcatataaaatctcgacagaagcatcctcagaaacttctttgtgatgtgtgcattcaagtcacagagttgaatattccctttcacagagtaggtttgaaacactctttttgtagtatctggaagtggacatttggagcgccttgacacctacggtgaagagggaaatatcttcccataaaaactagacagaagcaatctcagaatcttctttgggatatatgcacgcagctaacagagttgaacctttctattgacagagcagttttgaaacagtctttctgtggaatctgcaagtggatatttggatagcttggaggatttcgttggaaacgggattacgtataaaaagtagacagcagcatcctcagaaacttctttgtgatgtgtgcattcaagtcacagagttgaacattccctttcgtacagcagtattgaatcactctttctgtagtatctggaagtgaacattaggacagctttcaggtctatggtgagaaaggaaatatcttcaaataaaaactagacagaagcattctcataaacttgtttgtgatgtgtgaactcagctaacagaggtggatctttcttttgatagagcagttctgaaaaacactttttgttgaatctgcaagtggacatttggatagatttgaagatttcgttggaaacgggaatatcttcatatcaaatctagacagaagcattctcagaaacgtctttgtgatgtttgcattcaacccatagagttgaacattccctttcagagagcagctttgaagcactctttttgtagtatgtgcaaggggatatttggagcgctctgaggcctaaggtgaaaaagcaaatatcttcccataaccactagacagaaacattctcagaaactcctttatgacgtatgcactcacctaacagagaagaaccttccttttgacagagcagttttgatacactctttttgtagaatctgcaagtggatatttggatagctgtgaagatttcgttggaaacgggaatatcttcctataaaatctagacagaagcattctcagaaactgctctgtgatgtctgcattcaagtcacagagttgaacattgcctttcatagagcagctttgaaacgctctttttgtagtatatggaagtggacgtttcagacggtttgaggcccatggtgataaagggaatatcttcccctacaagctagaaagaagcattctgtgaaacttgtttgtgatgtgtgtactcaactaacagagttgaacctttctttttacagagcacttttgaaacactctttttgtagaatctgcgaggggatatttggatacatttcagcatttcgttggaaacgggaatatcttcatataaaatctcgacagaagcattctcagaaacttctttgtgatatctgcattcaagtcacagagttgaatattccctttcacagagtaggtttgaaacactctttttgtagtatctggaagtggacatttggagcgccttaacacctacggtgaaaagagaaatatcttcccataaaaactagacagaagcaatctcagaatcttctttgggatatatgcacgcaagctaacagagttgaacctttctattgacagagcagttttgaaacagtctttctgtggaatctgcaagtggatatttggatagcttggaggatttcgttggaaaagggattacgtataaaaagtagacagcagcatcctcagtaaacttctttgtgatgtgtgcattcaagtcacatagttgaacattccctttcgtacagcagttttgaaacactctttctgtagtatctggaagtgaacattaggacagctttcagctctatggtgagaaaggaaatatcttcaaataaaaactagacagaagcattctcataaacttgtttgtgatgtgtgaactcagctaacagaggtggatctttcttttgatagagcagttctgaaaaacactttttgttgaatctgcaagtggacatttggatagatttgaagatttcgttggaaacgggaatatcttcatatcaaatctatacagaagcattcccagaaacgtctttgtgatgtttgcattcaactcatagagttgaacattccgtttcagagagcagctttgaagcactctttttgtagcatgtgcaaggggatatttggagagctctgaggcctacggtgaaaaagcaaatatcttcccataaccactagacagaaacattctcagaaactcctttatgacgtatgtactcaactaacagagaagaaccttccttttgacagagcagttttgatacactctttttgtagaatctgcaagtggatatttggatagctgtgaagatttcgttggaaacgggaatatcttcctataaaatctagacagaagcattctcataaactgctctgtgatgtctgcattcaagtcacagagttgaacattgcctttcatagagcaggtttgaaacgctctttttgtagtatatggaagtagacgttttggacggtttgaggcccatggtgataaagggaatatcttcccctacaagctagaaagaagcattctgtgaaacttgtttgtgatgtgtgtactcaactaacagagttgaacctttctttttacagagcagttttgaaacactctttttgtagaatctgcgaggggatatttggatagatttcaggatttcgttggaaacgggaatatcttcatataaaatctcgacagaagcattctcagaaacttctttgtgatatctgccttcaagtcacagagttgaatattccctttcacagagtaggtttgaaacactctttttgtagtatctggaagtggacatttggaacgccttggcgcctacggtgaaaaggtaaatatcttcccataaaaactagacagaagcaatctcagaatcttctttgggatatatgcacgcagctaatagagttgaacctttctattgacagagcagttttgaaacagtctttctgtggaatctgcaagtggatatttggatagcttgggggatttcgttggaaacgggattacgtataaaaagtagacagcagcatcctcagaatcttccttgtgatgtgtgctttcaagtcacagagttgaacattccctttcgtacagcagttttgaaaaactctttctgtagtatctggaagtgaactttaggagagctttcaggtctatagtgagaaaggatatatcttcaaataaaaactagacagaagcattctcataaacttgttcgtgatgtgtgaactcagctaacacacgtggatctttcttttgatagagcagttctgaaaaacactttgttgaatctgcaagtggacatttggatagatttgaagatttcgttggaaacgggaatatcttcatatcaaatcaagacagannnnnnnnnnnnnnnnnnnnnnnnnnnnnnnnnnnnnnnnnnnnnnnnnnnnnnnnnnnnnnnnnnnnnnnnnnnnnnnnnnnnnnnnnnnnnnnnnnnnataattctcagtaacttccttgtgttgtgtgtattcaactcacagagttgaaggatcctttacagagagcaggcttgaaacactctttttgtcgaatttgcaagtggagatttcagccgctttgaggtcaaaggtagaataggaaatatcttcttatagaaactagacacaatgattctcagaaaatcttttgtgatgtgtgcgttcaactcacagagtttaacttttcttctcatagagcagttaggaaacactctgtttgtaaagtctgcaagtggatattcagacctctttgaggccttcgttggaaacgggatttcttcatattatgctagacagannnnnnnnnnnnnnnnnnnnnnnnnnnnnnnnnnnnnnnnnnnnnnnnnnnnnnnnnnnnnnnnnnnnnnnnnnnnnnnnnnnnnnnnnnnnnnnnnnnnatcattctcagaaactgctctgcgatgtgtgcgttcaactctcagagtttaacttttcttttcattcagcagtttggaaacactctgtttgtaaagtctgcacgtggatattttgaccacttagaggccttcgttggaaacgggtttttttcctgtaaggctagacagaagaattcccagtaacttccttgtgttgtgtgtgttcaactcacagagttgaactttcatttacacagagcagatttgaaacactctttttgtggaatttgcaagtggagatttcaagcgctttgaggccaaaggcagaaaaggaaatatcttcgtttcaaaactagacagannnnnnnnnnnnnnnnnnnnnnnnnnnnnnnnnnnnnnnnnnnnnnnnnnnnnnnnnnnnnnnnnnnnnnnnnnnnnnnnnnnnnnnnnnnnnnnnnnnnaatattctgggaaagttctttgtggtgcgtgcattcatgtcatagagttgaaactttcttttgatggagcagttttgaaacactctttttgtacaatctgctagtggataattggagccctttgaggactattgtggaaaaggaaatatcttcacgtaaaaactacatagaaccattctgagatacttctttttgatgtttgcattcatctcacagtgttgaaactttcttttgattgagcagttttgaaacactctttttgtagaatctgcaagtgaataattggagccctttgagggctatggtagaaaaggaaatatcttcaaataagaactacaaagaaacattctcagaaacttatttgtgatgtgtgcattcaactcacagggctgaacatatcttttgatttagcagttttgaatttctctttttgcagaatctgcaaggggatgtttggagagctttcaggcatattgtggaaagggaaatattttcacataaaaactacacagaaccattctgagaaacttctttgtgtcgtgtgcattcaactcacagagttgaacatatgtcctctttgagcagttttgcgtctctctttttgtagaatgtacaagtggatatttggagcccattgtgtcctatggtggaaaaggaaatatcttcagataaaaattacacagaagcattctgataaacttctttgtgatgtatgcattcaactcacagacttgaacctatcttaagaatgagcagttttgaatctctctttttgcagaatctgcaactggatattttgagggccttaaggcctaccgtggaaaagcaattatcttcagattaaaactacacagaagcattcagagaaacatctttgtgatgtttgcattcatctcacagagttaaaactttctcttgatggagcagttttgaaacactctttttgtagaatctgcaagtggatatttggagccctttgaggcctgttgtggaaaaggaaatatcttcccatgaaaactacatagaagtattctgagaaacttctttgcaatgtgtgcattcaactcacaagagttgaacctatcttttgattgaggatttttgaatctttctttttgcagaatctgcaagtgtatgtttgcaaagctttgtggcctattgtggaaaaggaaatgtcttcacataaaaactacacatannnnnnnnnnnnnnnnnnnnnnnnnnnnnnnnnnnnnnnnnnnnnnnnnnnnnnnnnnnnnnnnnnnnnnnnnnnnnnnnnnnnnnnnnnnnnnnnnnnnagaattctcagaaacttgtttgtgatgtgtgtcctcaactgacagagttgtacctttctattgatagagtagttttgaaacactctttttgtggaatctgcaagtgaatatttggatagcttggaggatttcgttggaagcgggaattgaaatgaaaggtagacagcagcattctcagaaattactttctgatgtctgcattcaactcatagagttgaagattccctttcatagagcaggtttgaaacactctttctgtagtatctggatgtggacacttggagcgctttgatacctacggtgaaaaagtaaatatcttcccataaaaactagacagaaggattctcagaaacaagtttgtgatgtgtgtactcagctaacagagtggaacctttctttttacagagcagctttgaaactctattgttgtggattctgcaaattgatatttagattgctttaacgatatcgttggaaaagggaataccgtcatagaaaatctagacagaagcattctcacaaacttctttgtgatgtgtgtcctcaactaacagagttgaacctttcttttgatgcagcaatttggaaacacccttttggtagaaactgtaactggatatttggatagctctaacgatttcgtgggaaacgggaatatcatcatctaaaatgtagacagaagcactattagaaactacttggtgatatctgcattcaagtcacagagtagaacattcccttacttcgagcacgtttgaaacactcttttggaagaatctggaagtggacatttggagcgctttgatgcctttggtgaaaaggaaacgtcttccaataaaagccagacagaagcattctcagaaacttgttggtgatgtgtgtactcaactaaaagagttgaacctttctattgatagagcagttttgaaacactctttttgtggattctgcaagtggatatttggattgctttgaggatttcgttggaagcgggaattcgtataaacactagacagcagcattcccagaattttctttcggatatttccattcaactcatagagttgaacatggcctttcatagagcaggtttgaaacactctttttgtagtttgtggaagtggacatttcgatcgccttgacgcctacgctgaaaaaggaaatatcttcccataaaaaatagacagaagcattctgagaaacttgttggtgatatgtgtcctcaactaacagagttgaactttgccattgatacagagcagttttgaaacactctttttgtggaatctgcaagtggatatttggatagcttggaggatttcgttggaagcgggaattcaaataaaaggtagacagcagcattctcagaaatttctttctgatgtctgcattcaactcatagagttgaagattccctttcatagagcaggtttgaaacactctttctggagtatctggatgtggacatttggagcgctttgattcctacggtgaaaaagtaaatatcttcccataaaaacgagacagaaggattctcagaatcaagtttgtgatgtgtgtactcagctaacagagtggaacctctcttttgatgcagcagtttggaaacactctttttgtagaaactgtaagtggatatttagatagctctaatgatttcgttggaaacgggaatatcatcatctaaaatctagacagaagccctctcagaaactactttgtgatatctgcattcaagtcagagagttgaacattcgctttcttagagcacgtttgaaacactctttttgtagtatctggaagtggacatttggagcgctttgatgcctttggtgaaaaagggaacgtcttcccataaaaactagacagaagcattctcagaaacttgtttgtgatgtgtctacccagctaaaggagttgaacatttctattgatagagcagttttgaaacactctttttgtggaaaatgcaggtggatatttggatagcttggaggatttcgttggaagcgggaattcaaataaaaagtagacagcagcattctcagaaatttctttctgatgtctgcattcaactcatagagttgaagattccctttcatagagcaggtttgaaacactctttctggagtatctggatgtggacaattggagcgctttgatgcctacggtggaaaagtaaatatcttctgataaaaacgagacagaaggattctcagaaacaagtttgtgatgtgtgtactcagctaacagagtggaacctttctttttacagagcagctttgaaactctatttttgtggattctgcaaattgatatttagattgctttaacgatatcgttggaaaagggaatatcgtcatacaaactctagacagaagcattctcacaaacttctttgtgatgtgtgtcctcaactaacagagttgaacctttcttttgatgcagcaatttggaaacacccttttggtagaaactgtaactggatatttggatagctctaacgatttccttggaaacgggaatatcatcatctaaaatctagacagaagcactattagaaactacttggtgatatctgcattcaagtcacagagttgaacatacccttactttgagcacgtttgaaacactcttttggaagaatctggaagtggacatttggagcgctttgatgcctttggtgaaaaggaaacgtcttccaataaaagccagacagaagcattctcagaaacttgtttgtgatgtgtgtactcaactaaaagagttgaacctttctattgatagagcagttttgaaacactctttttgtggattctgcaagtggatatttggattgctttgaggatttcgttggaagcgggaattcatataaaaactagacagcagcattcccagaaatttctttcggatatttccattcaactcattgagatgaacatcgcgtttcatagagcaggtttgaaacactctttttgtagtttgtggaagtggacatttcgatcgccttgacgcctacagtgaaaaaggaaatatcttcccataaaaaatagacagaagaactctcagaaacttgtttgtgatgtgtatcctcaactgacagagttgaaccttgccattgatagagcagtttagaaacactgtttttgtggaatctgcaagtggatatttggatagcctggaggattttgttggaagcgggaattcaaatgaaaggtagacagcagcattctcagaaatttctttctgatgtctgcattcaactcatagagttgaagattccctttcatagagcaggtttgaaacactctttgtggagtatctggatgtggacatatggagcgctttgatgcctacggtgaaaaggtaaatatcttcccataaaaacgagacagaaggattctcagaaacaagtttgtgatgtgcgtactcagctaacagagtggaacctctcttctgatgcagcagtttggaaacactctgtttgtagaaactgtaagtggatatttggatagctctaatgatttcgttggaaacgggaatatcatcatctaaaatctagacagaagcagtctcagaatctactttgtgatatctgcattccagtcacagagttgaaaactcccttacttagagcaggtttgaaacactctttttgtagaatctggaagtggacatttggagcgctttgatgcctttggtgaaaaaggaaatgtcttcccttaaaaagtagacagaagcattctcagaaacttgtttgtgatgtgtatacctagctaaaggagttgaacatttctattgatagagcagttttgaaacactctttttgtggaaaatgcaggtggatatttggataggttggaagatttcgttggaagcgggaattcaaataaatggtagacagcagcattctcagaaattagtttctgatgtctgcattcaactcatagagttgaagattccctttcatagagcaggtttgaaacactctttctggaatatctggatgtggacatttggagcgctttgatgcctacggtgaaaaagtaaatatcttcccataaaaacgagacagaaggatactcagaaacaagtttgtgatgtgtgtactcagctaacagagtggaacctttctttttacagagcagctttgaaactctatttttgtggattctgcaaattgatatttagattgctttaacgatatcgttggaaaagggaatattgtcatacaaaatctagagagaagcattctcacaaacttctttgtgatgtgtgtcctcaactaacacagttgaacttttcttttgatgcagcagtttggaaacactgtttttgtagaaactgtaagtggatatttggatagctctaacgatttcgttggaaacgggaatatcatcatctaaaatctagacagaagcactattagaaactacttggtgatatctgcattcaagtcacagagttgaacattcccttactttgaacacgtttgaaacactcttttggaagaatctggaagtggacatttggagcgctttgatgcctttggtgaaaaggaaacgtcttccaataaaagccagacagaagcattctcagaaacttgttcgtgatgtgtgtactcaactaaaagagttgaacctttctattgatagagcagttttgaaacactctttttgtggattctgcaagtggatatttggattgctttgaggatttcgttggaagcgggaattcgtataaacactagacagcagcattcccagaaatttctttcggatatttccattcaactcatagagatgaatatggcctttcatagagcaggtttgaaacactctttttgtagtttgtggaagtggacatttcgatcgccttgacgcctacggtgaaaaaggaaatatcttcccataaaaaatagacagaagaattctcagaaacttgtttgtgatgtgtatcctcaactgacagagttgaaccttgccattgatagagcagtttagaaacacactttttgtggaatctgcaagtggatatttggatagcctggaggatttcgttggaagcgggaattcaaatgaaaggtagacagcagcattctcagaaatttctttgtgatgtttgcattcaactcatagagttgaacattccctttcatagagcaggtttgaaacactctttctgtactatgtggatgtggacatttggaacgctttgatgcctatggtgaaaaagtaaatatcttcccataaaagctagacagaaggattctcagaaacaagtttgtgatgtgtgtactcagctaacagagtggaacctctcttttgatgcagcagtttggaaacactctttttgtagaaactgtaagtggatatttggatagctctaatgatttcgttggaaacgggaatatcatcatctaaaatctagacagaagccctctcagaaactactttgtgatatctgcattcaagtcacagggttgatcattcgctttcttagagcacgtttgaaacactctttttgtagtgtatggaagtggacatttggagcgctttgatgcctttggtgaaaaagggaacgtcttcccataaaaactagacagaagcattctcagaaacttgtttgtgatgtgtgtacccagccaaaggagttgaacacttctattgatagagcagttttgaaacactcttgttgtggaaaatgcaggtggatatttggatagcttggaggatttcgttggaagcgggaattcaaataaaaggtagacagcaggattctgagaaacaagtttgtgatgtgtgtactcagctaacagagtggaacctctcttttgatgcagcagtttggaaacactctttttgtagaaactgtaactggatatttggatagctctaatgatttcgttggaaacgggaatatcatcatctaaaatctagacagaagccctctcagaaactactttttgatatctgcattcaagtcacagagttgaacattcgctttcttagagcacgtttgaaacactctttttgtagtgtctggaagtggacatttggagcgctttgatgcctttggtgaaaaagggaatgtcttcccataaaaactagacagaagcattctcagaaacttgtttgtgatgtgtgtacccagccaaaggagttgaacatttctattgatagagcagttttgaaacactcttgttgtggaaaatgcaagtggatatttggatagcttcgaggatttcgttggaagcgggaattcaaataaaaggtagacagcagcattctcagaaatttctttctgatgtctgcattcaactcatagagttgaagattccctttcatagagcaagtttgaaacactctttctggagtatctggatgtggacatttggagcgctttgatgcctacggtgagaaagtaaatatcttcccataaaaacgagacagaaggattctcagaaacaagtttgtgatgcgtgtactcagctaacagagtggaacctttctttttacacagcagcttggaaactctatttttgtggattctgcaaattgatatttagattgctttaacgatatcgttggaaaagggaatatcgtcatacaaaatctagacagaagcattctcacaaacatctttgtgatgtgtgtcctcaactaacagagttgaacctttcttttgatgcagcagtttggaaacacccttttggttgaaactgtaactggatatttggatagctctaacgatttcgttggaaacgggaatatcatcatctaaaatctagacagaagcactattagaaactacttggtgatatctgcattcaagtcacagagttgaacattcccttactttgagcacgtttcaaacactcttttggaagaatctggaagtggacatttggagcgctttgatgcctttggtgaaaaggaaatgtcttccaataaaagccagacagaagcattctcagaaacttgtttgtgatgtgtgtactcaactaaaagagttgaacctttgtattgatagagcagttttgaaactctcttatgtggattctgcaagtggatatttggattgctttgtggatttcgttggaagcgggaattcgtataaaaactagacagcagcattcccagaaatttctttcggatatttccattcaactcatagagatgaacattgcctttcatagagcaggtttgaaacactctttttgtagtttgtggaagtggacatttcgatcgccttgatgcctacggtgaaaaaggaaatatcttcccataaaaaatagacagaagaattctcagaaacttgtttgtgatgtgtatcctcaactgacagagttgaacctttccattgatagagcagttttgaaacacgctttttgtggaatctgcgagtggatatttggatagcctgggggatttcattggaagcgggaattcaaataaaaggtagacagcagcattctcagaaatttctttctgatgtctgcattcaactcatagagttgaagattccctttcatagagcaggtttgaaacactctttctggagtatctggatgtggacatttggagcgctttgatgcctacggtgaaaaagtaaatatcttcccataaaaacgacacagaaggattctgagaaacaagtttgtgatgtgtgtactcagctaacagagtggaacctctcttttgatgcagcagtttcgaaacactctttttgtagaaactgtaagtggatatttggatagctctaatgatttcgttggaaacgggaatatcatcatctaaaatctagacagaagccctctcagaaactactttgtgatatctgcattcaagtcacagagttgaacattcgttttcttagagcacgtttgaaacactctttttatagtgtctggaagtggacatttggagcgctttgatgcctttggtgaaaaagggaacgtcttcccataaaaactagacagataagcattctcagcaaacttgtttgtgatgtgtgtacccagctaaaggagttgaacatttccattgatagagcagttttgaaacactctttttgtggaaaatgcaagtggatatttggatagcttggaggatttcgttggaagcgggaattcaaataaaaggtagacaggagcattctcagaaatttctttgtgatgtttgcattcaactcatagagttgaacattccctttaatagagcaggtttgaaacactctttctgtactatgtggatgtggacatttggagcgctttgacgcctacggtgaaaaaggaaatgtcttcccataaaaaattgaagaaggtttctcagaaacaagtttgtgatgtgtgtactcagctaacagagtggaacccttctttttaaagagcagctttgaaactctatttttgtggattctgcaaattgatatttagattgctttaacgatatcgttggaaaagggaatatggtcacacaaaatctagacaaaagctttctcagaaacttgtatgtgatgtgtgtcctcaactaacagagttgaacctttcttttgatgcagcagtttggaaacacacttttggtagaaactgtaagtggatatttggatagctctaacgatttcgttggaaacgggaatatcatcatctaaaatctagacagaaagcactattagaaactacttggtgatatctgcattcaagtcacagagttgaacattcccttactttgagcacgtttgaaacactcttttggaagaatctggaagtggacatttgcagcgctttgatgcctttggtgaaaaggaaacgtcttccaataaaagccagacagaagcattctcagaaacttgttcatgatgtgtgtactcaaccaaaagatttgaacctttctattgatagagcagttttgaaacactctttttgtggattctgcaagtggatatttggattgctttgaggatttcgttggaagcgggaattcgtataaaaactagacagcagcatttccagaaatttctttcggatatttccattcaactcatagagatgaacatggcctttcatagagcaggtttgaaacactctttttgtagtttgtggaagtggacatttcgatcgccttgacgcctacggtgaaaaaggaaatatcttcccataaaaaatagacagaagcattctcagaaacttgctggtgatatgtgtcctcaactaacagagttgaactttgccattgatagagagcagttttgaaacactctttttgtggaatctgcaagtggatatttggatagcttggaggatttcgttggaagcgggaattcaaataaaaggtagacagcagcattctcagaaatttctttgtgatgtttgcattcaactcatagagttgaacattccctttcatagagcaggtttgaaacactctttctgtactatctggatgtggacatttggaacgctttgatgcctacggtgaaaaagtaaatatcttcccataaaacctagacagaaggattctcagaaagaagtttgtgatgtgtgtactcagctaacagagtggaacctctcttttgatgcagcagtttggaaacactctttttgtagaaactgtaactggatatttggatagctctaatgatttcgttggaaacgggaatatcatcatgtaaaatctagacagaagcagtctcagaaactactttgtgatatctgcattccagtcacagagttgaaaactcccttacttagagcaggtttgaaacactctttttgtagaatctggaagtggacatttggagcactttgatgcctttggtgaaaaaggaaatgtcttcccttaaaaagtagacagaagtattctcagaaacttgtttgtgatgtgtgtacccagccaaaggagttgaacatttctattgatagagcagttttgaaacactcttgttgtggaaaatgcaggtggatatttggatagcttggaggatttcgttggaagcgggaattcaaataaaaggtagacagcagcattctcagaaatttctttctgatgtctgcattcaactcatagagttgaagattccctttcatagagcaggtttgaaacagtctttctggagtatctggatgtggacatttggagcgcttagatgcctacggtgaaaaagtaaatatcttcccataaaaacgagacagaaggattctgagaaacatgtttgtgatgtgtgtactcagctaacagagtgtaacctttctttttacagagcagctttgaaactctatttttgtggattctgcaaattgatatttagattgctttaacgatatcgttggaaaagggaatatcgtcatacaaaatctagacagaaggattctcacaaacttctttgtgatgtgtgtcctcaactaacagagttgaacctttcttttgatgcagcagtttggaaacactctttttgtagaaactgtaactggatatttggatagctctaatgatttcgttggaaacgggaatatcatcatgtaaaatctagacagaagcactattagcaaactacttggtgatatctgcattcaagtcacagagttgaacattcccttactttgagcacgtttgaaacactcttttggaagaatctggaagtggacatttgcagcgctttgatgcctttggtgaaaaggaaacgtcttccaataaaagccagacagaagcattctcagaaacttgtttgtgatgtgtgtactcaactaaaagagttgaacctttctattgatagagcagttttgaaacactctttttgtggattctgcaagtggatatttggattactttgaggatttcgttggaagcgggaattcgtataaacactagacagcagcattcccagaaatttctctcggatatttccattcaactcatagagatgaacatggcctttcatagagcaggtttgaaacactctttttgtagtttgtggaagtggacatttcgatcgccttgacgcctacggtgaaaaaggaaatatcttcccataaaaaatagacagaagcattctcaaaaacttgttggtgatatgtgtcctcaactaacagagttgaactttgccattgatagagagcagttttgaaacactctttttgtggaatctgcaagtggatatttggatagcttggaggatttcgttggaagcgggaattcaaataaaaggtagacagcagcattctcagaaatttctttctgatgtttgcattcaactcatagagttgaacattccctttaatagagcaggtttgaaacattctttctttactatctggatgtggacatttggagcgctttgacgcctacggtgaaaaaggaaatgtcttcccataaaaaattgaagaaggattctcagaaacaagtttgtgatgtgtgtactcagctaacagagtggaacctttcttttgacagagcagctttgaaactctatttttgtggattctgcaaatggatatttagattgctttaacgatatcgttggaaaagggaatatcgtcatacaaaatctggacagaagcattctcacaaacttctttatgatgtgtgtcctcaactaacagagttgaacctttcttttgatgcagcaatttggaaacacccttttggtagaaactgtaactggatatttggatagctctaacgatttcgttggaaacgggaatatcatcatctaaaatctagacagaagcactattagaaactacttggtgatatctgtattcaagtcacagagttgaacattcccttactttgagcacgtttgaaacactcttttggaagaatctggaagtggacatttggagcactttgatgcctttggtgaaaaggaaacgtcttccaataaaagccagagagaagcattctcagaaacttgtttgtgatgtgtgtactcaactaaaagagttgaaccttactattgatagagcagttttgaaacactctttttgtggattctgcaagtggatatttggattgctttgaggatttcgttggaagcgggaattcgtataaaacctagacagcagcattcccagaaatttctttcggatatttccattcaactcatagagatgaacatggcctttcatagagcaggtttgaaacactctttttgtagtttgtggaagtggacatttcgatcgcctcgacgcatacggtgaaaaaggaaatatcttcccataaaaaatagacagaagcattctcagaaacttgttggtgatatgggtcctcaactaacagagttgaactttgccattgatagagagcagttttgaaacactctttttgtggaatctgcaagtggatatttggatagcttggaggatttcgttggaagcgggaattcaaataaaaggtagacagcagcattctcagaaatttctttctgatgtctgcattcaactcatagagttgaagattccctttcatagagcaggtttgaaacagtctttctggagtatctggatgtggacatttgaagcgctttgatgcctacggtgaaaaagtaaatatcttcccataaaaacgagacagaaggattctcagaaacaagtttgtgatgtgtgtactcagctaaaagagtagaacctttctttttacagagcagctttgaaactctatttttgtggattctgcaaattgatatttagattgctttaacgatatcgttggaaatgagaatatcgtcatagaaaatctacacagaagcattctcacaaacttctttgtgatgtgtgtcctcaactaacagagttgaacctttcttttgatgcagcagtttggaaacactgtttttgtagcaactgtaagtggatatttggatagctctaacgatttcgttggaaacgggaatatcatcatctaaaatctagacagaagcactattagaaactacttggtgatatctgcattcaagtcacagagttgaacattcccttactttgagcacgtttgaaacagtcttttggaagaatctggaagtggacatatggagcgctttgatgcctttggtgaaaaggaaacgtcttccaataaaagccagacagaagcattctcagaaacttgttcgtgatgtgtgtactcaactaaaagagttgaacatttctattgatagagcagttttgaaacactctttttgtggattctgcaagtggatatttggattgctttgaggatttcgttggaatcgggaattcgtataaacactagacagcagcattcccagaaatttctttcggatatttccattcaactcattgagatgaacatcgcctttcatagagctggtttgaaacactctttttgtagtttgtggaagtggacatttcgatcgccttgacgcctacagtgaaaaaggaaatatcttcccataaaaaatagacagaagaattctcagaaacttgtttgtgatgtgtatcctcaactgacagagttgaaccttgccattgatagagcagtttagaaacactctttttgtggaatctgcaagtggatatttggatagactggaggatttcgttggaagcgggaattcaaatgaaaggtagacagcagcattctcagaaatttctttctgatgtctgcattcaactcgtagagttgaagattccctttcatagagcaggtttgaaacactctttctggagtatctggatgtggacatttggagcgctttgatgcctacggtgaaaaagtatatatcttcccataaaaacgagacagaaggattctcagaaacaagtttgtgatgtgtgtacacagctaacagagtggaacctctcttctgatgcagcagtttggaaacactctttttgtagaaactgtaagtggatatttggatagctctaatgatttcgttggaaatgggaatatcatcatctaaaatctagacagaagccctctcagaaactactttgtgatatctgcattcaagtcacagagttgaacattcgctttcttagggcacgttggaaacactctttttgtagtgtctggaagtggacatttggagcgctttgatgcctttggtgaaaaagggaacgtcttcccataaaaactagacagaagcattctcagaaacttgtttgtgatgtgtgtacccagccaaaggagttgaacatttctattgatagagcagttttgaaacactctttttatggaaaatgcaagtggatatttggatagcttggaggatttcgttggaagcgggaattcaaataaaaggtagacagcaggattctcagaaacaagtttgtgatgtgtgtactcagctaacagagtggaacctttctttttacagagcagctttgaatctctatttttgtggattctgcaaattgatatttagattgctttaacgatatcgttggaaaagggaatatggtcatacaaaatctagacagaagcattctcacaaacttctttgtgatgtgtgtcctcaactaacagagttgaacctttcttttgatgcagcaatttggaaacacccttttggtagaaactgtaactggatatttggatagctctaacgatttcgttggaatcgggaatatcatcatctaaaatctagacagaagcactattagaaactacttggtgatatctgcattcaagtcacagagtagagcattcccttacttcgagcacgtttgaaacactcttttggaagaatctggaagtggacatttggagcgctttgatgcctttggtgaaaaggaaacgtcttccaataaaagccagacagaagcattctcagaaacttgtttgtgatgtgtgtactcaactaaaagagttgaacctttctattgatagagcagttttgaaacactctttttgtggattctgcaagtggatatttggattgctttgaggatttcgttggaagcgggaattcatataaaaactagacagcagcattcccagaaatttctttcggatatttccattcaactcatagagatgaacatcgcctttcatagagcaggtttgaaacactctttttgtagtttgtggaagtggacatttcgatcgctttgatgcctacggtgaaaaaggaaatatcttcccataaaaaatagacagaagcattctcagaaacttgttggtgatatgtgtcctcaactaacagagttgaactttgccattgatagagagcagtttggaaacactctttttgtggaatctgcaagtggatatttggatagcttggaggatttcgttggaagcgggaattcaaataaaaggtagacagcagcattctcagaaatttctttctgatgtctgcattcaactcatagagttgaagattccctttcatagagcaggtttgaaacactctttctggagtatctggatgtggacatttggagcgctttgatgcctacggtggaaaagtaaatatcttcccataaaaacgagacagaaggattctgagaaacaagtttgtgatgtgtgtactcagctaacagagtggaacctctcttttgatgcagcagtttggaaacactctttttgtagaaactgtaagtgtatatttggatagctctaatgatttcgttggaaacgggaatatcatcatctaaaatctagacagaagcactctcagaaacttctttgtgatatctgcattcaagtcacagagttgaacattcgctttcttagagcacgtttgaaacactctttttgtagtgtctggaagtggacatttggagcgctttgatgcctttggtgaaaaagggaatgtctttccataaaaactagacagaagcattctcagaaacttgtttgtgatgtgtgtacccagcgaaaggagttgaacatttctattgatagagcagttttgaaacactctttttgtggaatctgcaagtggatatttggatagcttggaggttttcgttggaagagggaattcaaataaaaggtagacagcagcattctcagaaatttctttctgatgtttgcattcaactcatagtgttgaacattccctttaatagagcaggtttgaaacactctttctgtactatctggatgtggacatttggagcgctttgacgcctacggtgaaaaaggaaatgtcttcccataaaaaattgaagaaggattctcagaaacaagtttgtgatgtgtgtactcagctaacagagtggatcctttctttttacagagcagctttgaaactctatttctgtggattctgcaaattgatatttgggttgatttaacaatatcgttggaaaagggaatatcttcatacaaaatctagacagaagcattctcacaaacttctttgtgatgtgtgtcctcaactaacagagttgaacctttcttttgatgcagcaatttggaaacacccttttggtagaaactgtaactggatatttggataactctaacgatttcgttggaaacgggaatatcatcatctaaaatgtagacagaagcactattagcaaactacttggtgatatctgcattcaagtcacagagttgaacattcccttactttgagcacgtttgaaacactcttttggaagaatctggaagtggacatttggagcgctttgatgcctttggtgaaaaggaaacgtcttccaataaaagccagacagaagcattctcagaaacttgtttgtgatgtgtgtactcaactaaaaggagttgaacctttctattgatagagcagttttgaaacactctttttgtggattctgcaagtggatatttggattgctttgaggatttcgttggaagcgggaattcgtataacaactagacagcagcattcccagaaatttctttcggatatttccattcaactcatagagaagaacatggcctttcatagagcaggtttgaaacactctttttgtagtttgtggaagtggacatttcgatcgccttgacgcctacggtgaaaaaggaaatatcttcccataaaaaaaagacagaagcattctcagaaacttgttggtgatatgtgtcctcaactaacagagttgaactttgccattgatagagagcagttttgaaacactctttttcctgaatctgcaagtggatatatggatagcttggaggatttcgttggaagcgggaattcaaataaaaggtagacagcaggattctgagaaacaagtttgtgatgtgtgtactcagctaacagagtggaacctctcttttgatgcagcagtttggaaacactctttttgtagaaactgtaagtggatatttggatagctctaatgatttcgttggaatcgggaatatcatcacctaaaatctagacagaagcactctcagaaactactttgtgatatctgcattcaagtcacagagttgaacattcgctttcttagagcacgtttgaaacactctttttgtagtgtctggaagtggacatttggagcgctttgatgcctttggtgaaaaagggaatgtcttcccataaaaactaggcagaagcattctcagaaacttgtttgtaatgtgtgtacccagctaaaggagttgaacgtttctattgatagagcagttttgaaacactctttttgtggaaaatgcaggtggatgtttggatagataggaggatttcgttggaagcgggaattcaaataaaaggtagacagcagcattctcagaaatttctttctgatgtttgcattcaactcatagagttgaacattccctttaatagagcaggtttgaaacactctttctgtactgtccggatgtggacatttggagcgctttgacgcctacggtgaaaaaggaaatgtcttcccataaaaaactgaagtattctcagaaacaagtttgtgatgtgtgtactcagctaacagagtggaacctctcttttgacgcagcagtttggaaacactctttttgtagaaactgtaagtggatatttggatagctctaatgatttcgttggaaacgggaatatcatcatctaaaatctagacagaagcattcccagaaatttctttcggatatttccattcgactcatagagatgaacatggcctttcatagagcaggtttgaaacactctttttgtagtttgtggaagtggacatttcgatcgccttgacgcctacggtgaaaaagggaatgtcttcccataaaaactagacagaagcattctcagaaacttgtttgtgatgtgtgtacccagccaaaggagttgaacatttctattgatagagcagttttgaaacgctccttttgtggaaaatgcaggtggatatttggatagcttggaggatttcgttggaagcgggaattcaaataaaaggtagacagcagcattctcagaaatttctttctgatgtctgcattcaactcatagagttgaagattccctttcatagagcaggtttgaaacactcgttctggagtatctggatgtggacatttggagcgctttgatgcctacggtggaaaagtaaacatcttcccataaaaacgagacagaaggattctcagaaacaagtttttgatgtgtgtactcagctaacagagtggaacctttctttttacagagcagctttgaaactctatttttgtggattctgcaaattgatatttagattgctttaacgatatcgttggaaaagggaatatcgtcatacaaaatctagacagaagcattctcacaaacttctttgtgatgtgtgtcctcaactaacagagttgaacctttcttttgatgcagcagtttggaaacaccctttttgtagaaactgtaagtggatatttggatagctctaacgatttcgttggaaacgggaatatcatcatctaaaatctagacagaagcactattagaaactacttggtgatatctgcattcaagtcacagagttgaacattcccttactttgagcacgtttgaaacactcttttggaagaatctggaagtggacatttggagcgctttgatgcctttggtgaaaaggaaacgtcttccaataaaagccagacagaagcattctgagaaacttgttcgtgatgtgtgtactcaactaaaagagttgaacctttctattgatagagcagttttgaaacactctttttgtggattctgcaagtggatatttggattgctttgaggatttcgttggaagcgggaattcgtataaaaactagacagcagcattcccagaaatttctttcggataattccattcaactcatagagatgaacatcgcctttcatagagcaggtttgaaacactctttttgtagtttgtggaagtggatatttcgatcgccttgacgcctatggtgaaaaaggaaatatcttcccataaaaaatagacagaagcattctcagaaacttgttggtgatatgtgtcctcaactaacagagttgaactttgtcattgatagagagcagttttgaaacactctttttcctgaatctgcaagtggatatttggatagcttggaggatttcgttggaagcgggaattcaaataaaaggtagacagcagcattctcagaaatttctttctgagatctgcattcaactcatagagttgaacattccctttcatagagcaggtttgaaatactctttctgtagtatctggatgtggacatttggagtgctttgatgcctacggtgaaaaagtaaatatcttcccataaaaacgagacagaaggattctcagaaacaagtttgtgatgtgtgtactcacctaacagagtggaacctctcttttgatgcagcagtttggaaacactctttttgtagaaactgtaagtggatatttggatagctctaatgatttcgttggaaacgggaatatcatcatctaaaatctagacagaagcactctcaaaaactactgtgtgatatctgcattcaagtcacagagttgaacattcgctttcttagagcacgtttgaaacactctttttgtagtgtctggaagtggacatttggagcgctttgattcctttggtgaaaaagggaatgtctacccataaaaactagacagaagcattctcagaaacttgtttgtgatgtgtgtacccagccaaaggagttgaacatttctattgatagagcagttttgaaacactcttgttgtggaaaatgcaagtggatatttggataccttggaggatttcgttggaagcgggaattcaaataaaaggtagacagcagcattctcagaaatttctttctgatgtctgcattcaactcatagacttgaaggttccctttcatagagcaggtttgaaacactctttctggagtatctggatgtggacatttggagcgctttgatgcctacggtgaaaaagtaaatatcttcccataaaaacgagacagaaggattctcagaaacaagtttgtgatgtgtgtactcagctaacagagtgaaacctttctttttacagagcagctttgaaactctatttttgtggattctgcaaattgatatttagattgctttaacgatatcgttggaaaagggaatatcgtcatacaaaatctagacagaagcattctcacaaacttctttgtgacgtgtgtcctcaactaacagagttgaacctttcttttgatgcagcagtttggaaacactgtttttgtagcaactgtaagtggatatttggatagcttctaacgatttcgttggaaacgggaatatcatcatctaaaatctagacagaagcactattagaaactacttggtgatatctgcattcaagtcacagagttgaacattctcttactttgagcacgtttcaaacactcttttggaagaatctggaagtggacatttggagcgctttgatgcctttggtgaaaaggaaacgtcttccaataaaagccagacagaagcattctcagaaacttgttcgtgatgtgtgtactcaactaaaagagttgaacctttctattgatagagcagttttgaaacactctttttgtggattctgcaagtggatatttggattgctttgaggattacgttggaagcgggaattcgtataaacactagacagcagcattcccagaaatttctttcggatatttccattcaactcatagagatgaacatggcctttcatagagcaggtttgaaacactctttttgtagtttgtggaagtggacatttcgatcgccttgacgcctacggtgaaaaaggaaatatcttcccataaaaaatagacagaagcattctcagaaacttgttggtgatatgtgtccttaactaacagagttgaactttgccattgatagagagcagttttgaaacactctttttgtggaatctgcaagtggatatttgcatagcttggaggatttcgttggaagcgggaattcaaataaaaggtagacagcagcattctcagaaatttctttctgatgtctgcattcaactcatagagttgaagtttccctttcatagagcaggtttgaaacactctttctggagtatctggatgtggacatttggagcgctttgatgcctacggtgaaaaagtaaatatcttcccataaaaacgagacagaaggattctgagaaacaagtttgtgatgtgtgtactcagctaacagagtggaacctctctttggatgcagcagtttggaaacactctttttgtagaaactgtaagtggatatttggatagctctaatgatttcgttggaaacgggaatatcatcatctaaaatctagatagaagccctctcagaaactactttgtgatatctgcattcaagtcacagagttgaacattcgctttcttagagcacgttggaaacactctttttgtagtgtctggaagtggacatttggagcgctttgatgcctttggtgaaaaagggaacgtcttcccataaaaactagacagaagcatgctcagaacttgtttgtgatgtgtgtacccagccaaaggagttgaacatttctattgatagagcagttttgaaacactctttttgtggaaaatgcaggtggatatttggatagcttggaggatttcgttggaagcgggaattcaaataaaaggtagacagcagcattctcagaaatttctttctgatgtctgcattcaactcatagagttgaagattccctttcatagagcaggtttgaaacactcgttctggagtatccggatgtggacatttggagcgctttgatgcctacggtggaaaagtaaatatcttcccataaaaacgagacagaaaggattctcagaaacaagtttgtgatgtgtgtactcagctaacagagtggaacctttctttttacagagcagctttgaaactctatttttgtggattctgcaaattgatatttagattgctttaacgatatcgttggaaaagggaatatcgtcatacaaaatctagacagaagcattctcacaaacttctttgtgatgtgtgtcctcaactaacagagttgaacctttcttttgatgcagcaatttggaaacacccttttggtagaaactgtaactggatatttggatagctctaacgatttccttggaaaagggaatatcatcatctaaaatgtagacagaagcactattagaaactacttggtgatatctgcattcaagtcacagagttgaacattcccttactttgagcacgtttgaaacactcttttggaagaatctcgaagtggacatttggagcgctttgatgcctttggtgaaaaggaaacgtcttccaataaaagccagacagaagcattctcagaaacttgttcctgatgtgtgtactcaactaaaagagttgaacctttctattgatagagcagttttgaaacactctttttgtggattctgcaagtggatatttggattgctttgaggatttcgttggaagcgggaattcgtataaacactagacagcagcattcccagaaatttctttcggatatttccattcaactcatagagatgaacatggcctttcatagagcaggtttgaaacactctttttgtagtttgtggaagtggacatttcgatcgccttgacgcctacgctgaaaaaggaaatatcttcccataaaaaatagacagaagcattctcagaaatttatttctgatgtttgcattcaactcatagagttgaacattccctttaatagagcaggtttgaaacactctttctgtactatctggatgtggacatttggagcgctttgacgcctacggtgaaaaaggaaatgtcttcccataaaaaattgaagaaacattctcagaaatttctttctgatgtgtgcattcaactcatagagttgaagattccctttcatagagcaggtttgaaacactctttctggagtatctggatgtggacatttggaccgctttgatgcctacggtgaaaaactaaatatgttcccataaaaacgagacagaaggattctcagaaacaagtttgtgatgtgtgtactcagctaacagagtggaacctttctttttacagagcagcttggaaactctatttttgtggattatgcaaattgatatttagattgctttaacgatatcgttggaaaagggaatatcgtcatacaaaatctagacagaaagcattctcacaaacttctttgtgatgtgtgtcctcaactaacagagttgaacctttcttttgatgcagcaatttggaaacacccttttggtagaaactgtaactggatatttggatagctctagcgatttcgttggaaacgggaatatcatcatctaaaatgtagacagaagcactattagaaactacttggtgatatctgcattcaagtcacagagttgagcattcccttactttgagcacgtttgaaacactcttttggaagaatctggaagtggacatttgcagcgctttgatgcctttggtgaaaaggaaacgtcttccaataaaagccagacagaagcattcgcagaaacttgttcgtgatgtgtgtactcaactaaaagagttgaacctttctattgatagagcagttttgaaacactctttttgtggattctgcaagtggatatttggattgctttgaggatttcgttggaagcgggaattcgtataaacactagacagcagcattcccagaaatttcttttggatatttccattcaacacatagagatgaacatggcctttcatattgaaacactctttttgtagtttgtggaagtggacatttcgatcgccttgatgcctacggtgaaaaaggaaatatcttcccataaaaaatagacagaagcattctcagaaacttgtttgtgatgtgtgtacccagctaaaggagttgaacatttgtattgatagagcagttttgaaacactctttttgtggaaaatgcaagtggatatttggatagcttggaggatttcgttggaagcaggaattcaaataaaaggtagacagcagcattctcagaaatttctgtctgatgtctgcattcaactcatagagttgaagattccctttcatagaggaggtttgaaacactctttctggagtatctggatgtggacatttggagcgctttgatgcctacggtgaaaaagtaaatatcttcccataaaaacgagacagaaggattctcagaaacaagtttgtgatgtgtgtactcagctaacagagtggaacctttctttttacagagcagctttgaaactctatttttctggattctggaaattgatatttagattgctttaacgatatcgttggaaaagggaatatcgtcatacaaaatctggacagaagcattctcacaaacttctttgtgatgtgtgtcctcaactaacagagttgaacctttcttttgatgcagcagtttggaaacactctttttgtagaaactgtaagtgcattattgaatagctctaacgatttcgttggaaacgggaatatcatcatctaaaatctagacagaaagcactattagtaaactacttggtgatatctgcattcaagtcacagagtagaacattcccttacttcgagcacgtttgaaacactcttttggaagaatctggaagtggacatttggagcgctttgatgcctttggtgaaaaggaaacgtcttccaataaaagccagacagaggcattctcagaaacttgtttgtgatgtgtgtactcaactaaaagagttgaacctttctattgatagagcagttttgaaacactctttttgtggattctgcaagaggatatttggattgctttgaggatttcgttggaagcgggaattcgtataaaaactagacagcagcattcccagtaaatttctttcggatatttccattcaactcatagagatgaacatcgcctttcatagagcacgtttgaaacactctttttgtagtttgtggaagtggacatttcgatcgccttgacgcctacggtgaaaaaggaaatatcttcccataaaaaatagacagaagcattctcagaaacttgttggtgatatgtgtcctcaactaacagagttgaactttgccattgatagagagcagttttgaaacactctttttgtggaatcagcaagtggatatttggatagcttgaaggatttcgttggaagcgggaattcaaataaaaggtagacagcagcattctcagcaaatttctttctgatgtctgcattcaactcatagagttgaagattccctttcatagagcaggtttgaaacactctttctggagtatctggatgtggacatttggagcgctttgatgcctacggtgaaaaagtaaatatcttcccataaaaacgacacagaaggattctcagaaacaagtttgtgatgtgtgtactcagctaacagagtggaacctctctttcgatgcagcagtttggaaacactctttttgtagaaactgtaagtggatatttggatagctctaatgatttcgttggaaacgggaatatcatcatctaaaatctagacagaagccctctcagaaactactttgtgatatctgcattcaagtcacagagttgaacattcgctttcttagagcacgtttgaaacactctttttgtagtgtctggaagtggacatttggagcgcttcgatgcctttggtgaaaaagggaatgtcttcccataaaaactagacagaagcattctcagaaacttctttgtgatgtgtgtacccagctaaaggagttgaacgtttctattgatagagcagttttgaaacactctttttgtggaaaatgcaagtggatatttgaatagcttggaggatttcgttggaagcgggaattcaaataaaaggtagacagcagcattctcagaaattactttctgatgtctgcattcaactcatagagttgaagattccctttcatagagcaggtttgaaacactctttctgtagtatctggatgtggacatttggagcgctttgatacctacggtgagaaagtaaatatcttcccataaaaactagacagaaggattctgagagacaagtttgtgatgtgtgtactcagctaacagagtggaacctttctttttacagagcagctttgaaactctatttttgtggattctgcaaatggatatttagattgctttaatgatatcgttggaaaagggaatatcgtcatacaaaatctggacagaagcattctcacaaacttctttgtgatgtgtgtcctcaactaacagggttgaacctttcttttgatgcagcagtttggaaacactctttttgtagaaactgtaagtggatatttggatagctctaacgatttcgttggaaacgggaatatcatcatctaaaatctagacagaagcactattagaaactacttggtgatatctgcattcaagtcaaagagttgaacattcccttactttgagcacgtttgaaacactcttttggaagaatctggaagtggacatttggagcgctttgatgcctttggtgaaaaggaaacgtcttccaataaaagccagacagaagcattctcagaaacttgtttgtgatgtgtgtactcaactaaaagagttgaacctttgtattgatagagcagttttgaaactctcttatgtggattctgcaagtggatatttggattgctttgaggatttcgttggaagcgggaattcgtataaaaactagacagcagcattcccagaaattactttcggatatttcctttcaactcatagagatgaacatggcctttcatagagcaggtttgaaacactctttttgtagtttgtggaagtggacatttcgatcgcctttacgcctacgctgaaaaaggaattatcttcccataaaaaatagacagaattctcagaaacttgtttgtgatgtgtatcctcaactgacagagttgtacctttctattgatagagtagttttgaaacactctttttgtggaatctgcaagtgaatatttggatagcttggaggatttcgttggaagcgggaattcaaatgaaaggtagacagcagcattctcagaaatttctttctgatgtctgcattcaactcatagagttgaacattccctttcatagagcagatttgaaacactctttctggagtatctggatgtggacatttggagcgctttgatgcctacggtgaaaaagtaaatatcttcccataaaaacgagacagaaggattctgagaaacaagtttgtgatgtgtgtactcagctaacagagtggaacctctgttttgatgcagcagtttggaaacactctttttgtagaaactgtaagtggatatttggatagctctaacgatttttttggaaacgggaatatcatcatctaaaatctagacagaagccctttcagaaactactttgtgatatctgccttcaagtcacagagttgaacattcgctttcttagagcacgtttgaaacactctttttgtagtgtctggaagtggacatttggagcgctttgatgcctttggtgaaaaagggaatgtcttcccataaaaactagacagaagcattctcagaaacttgtttttgatgtgtgtacccagcgaaaagagttgaacatttctattgatagagcagttttgaaacactctttttgtggaatctgcaagtggatatttggatagcttggaggttttcgttggaagcgggaattcaaataaaaggtagacagcagcattctcagaaatttctttctgatgtctgcattcaactcatagagttgaagattccctttcatagagcaggtttgaaacactctttctggagtatctggatgtggacatttggagcgctttgatgcctacggtgaaaatgtaaatatcttcccataaaaacgagacagaaggattctcagaaacaagtttgtgatgtgtgaactcagctaacagagtggatcctttctttttacagagcagctttgaaactctatttctgtggattctgcaaattgatatttgggttgatttaacgacatcgttggaaaagggaatatcttcatacaaaatctagacagaagctttctcagaaacttctttgtgatgtgtgtccacaactaacagagttgaaactttcttttgatgcagcagtttggaaacactctttttgtagaaactgtaagtggatatttggataggtctaacgatatcgttggaaacgggaatatcttcatctaaagtatacacagaagcactattagaaactacttggtgatatctgcattcaagtcacagagttgaacattcccttactttgagcacgtttcaaacactcttttggaagaatctttaagtggacatttggagcgctttgatgcctttggtgaaaaggaaacgccttccaataaaagccagacagaagcattctcagaaacctgttcgtgatgtgtgtactcaactaaaagagttgaacctttctattgatagagcagttttgaaacactctttttgtggattctgcaagtggatatttggattgatttgaggatttcgttggaagcgggaattcatataaaaactagacagcagcattcccagaaatttctttctcatatttccattcaactcatagagatgaacatggcctttcatagagcaggtttgaaacactctttttgtagtttgtggaagtggacatttcgatcgccttgacgcctacggtgaaaagaaatatcttcccataaaaaatagacagaattctcagaaacttgtttgtgatgtgtgtcctcaactgacagagttgtacctttctattgatagagtagttttgaaacactctttttgtggaatctgcaagtgaatatttggatagcttggaggatttcgttggaagcgggaattcaaatgaaaggaagacagcagcattctcagaaatttctttctgatgtcttgaattcaactcatagagttgaagattccctttcatagagcaggtttgaaacactctttctggagtatctggatgtggacatttggagcgctttgatgcctacggtgaaaaagtaaatatcttcccagaaaaacgagacagaaggattctcagaaacaagtttgtgatgtgtgtactcagctaacagagtggaacctttctttttacagagcagctttgaaactctatttttgtggattctgcaaattggtatttagattgctttaacgatatcgttggaaaagggaatatcgtcatacaaaatctagacagaagcattctcacaaacttctttgtgatgtgtgtcctcaactaatagagttgaacctttcttttgatgcagcagtttggaaacaaccttttggtagaaactgtaactggatatttggatagctctaacgatttctttggaaacgggaatatcatcatctaaaatctagacagaagcaccattagaaactacttggtgatatctgcattcaagtcacagagttgaacattcccttactttgagcacgtttgaaacactcttttggaagaatctggaagtggacatttgtaacgctttgatgcctttggtgaaaaggaaacgtcttccaataaaagccagacagaagcattctcagaaacttgtttgtgatgtgagcactcaactaaaagagttgaacctttctattgatagagcagttttgaaacactctttttgtggattctgcaagtggatatttggattgctttgaggatttcgttggaagcgggaattcgtataaacactagacagcagcattcccagaaatttctttcggatatttccattcaactcatagagatgaacattgcctttcatagagcaggtttgaaacactctttttgtagtttgtggaagtggacatttcgatcgccttgacgtctacggtgaaaaaggaaatatcttcccataaaaaatagacagaagaattctcagaaacttgtttgtgatgtgtatcctcaactgacagagttgaaccttgccattgatagagcagtttagaaacactctttttgtggaatctgcaagtggatatttggatagcttggaggatttcgttggatgcgggaattcaaatgaaaggttgacagcagcattctcagaaattactttctgatgtctgcattcaactcatagagttgaagattccctttcatagagcaggtttgaaacactctttctgtagtatctggatgtggacatttggagcgctttgatacctacagtgaaaaagtaaatatcttcccataaaaactagacagaaggattctcagaaacaagtttgtgatgtgtgtactcagctaacagagtggaacctctcttttgatgcagcagtttggaaacactctttttgtagaaactgtaagtggatatttggatagctctaatgatttcgttggaaatgggaatatcatcatctaaaatctagacagaagccctctcagaaactactttgtgatatctgcattgaagtcacagagttgaacattcggtttcttagagcacgtttgaaacaatctttttgtagtgtctggaagtggacatttggagcgctttgatgcctttggtgaaaaagggaatgtcttcccataaaaactagacagaagctttctcagaaacttgtttgtgatgtgtgtacccagcgaaaggagttgaacatttctattgatagagcagttttgaaacactctttttgtggaatctgcaagtggatatttgggtagcttggaggtttttgttggaagcgggaattcaaataaaaggtagacagcagcattctcagaaatttctttctgatgtctgcattcaactcatagagttgaagattccctttcatagagcaggtttgaaacactctttctggagtatctggatgtggacatttggcgcgctttgatgcctgcggtgaaaaagtaaatatcttcccataaaaacgagacagaaggattctcagaaacaagtttgtgatgtgtgtactcagctaacagagtggaacctttctttttacagagcagctttgaaactctatttttgtggattctgcaaattggtatttagattgctttaaccgatatcgttggaaaagggaatatcgtcatacaaaatctagacagaagcattctcacaaacttctttgtgatgtgtgtcctcaactaacagagttgaacctttcttttgatgcagcagtttggaaacaccctttttgtagaaactgtaactggatatttggatagctctaacgatttcgttggaaacgggaatatcatcatctaaaatctagagagaagcactattagaaactacttggtgatatctgcattcaagtcacagagttgaacattcccttactttgagcacgtttgaaacactcttttggaagaatctggaagtggacatttggagagctttgatgcctttggtgaaaaggaaacgtcttccaataaaagccagacagaagcattctcagaaacttgtttgtgatgtgtgtactcaactaaaagagttgaacctttctattgatagagcagttttaaaacactctttttgtggattctgcaagtggatatttggattgctttgaggatttcgttggaagcgggaattcgtataaaaactagacagcagcattcccagaaatttctttcggatatttccattcgactcatagagatgaacatggcctttcatacagcaggtttgaaacactctttttgtagtttgtggaagtggacatttcgatcgccttgacgcctacggtgaaaaaggaaatatcttcccataaaaaatagacagaagatttctcagaaacttatttgtgatgtgtatcctcaactgacagagttgaaccttgccattgatagagcagtttagaaaccctctgtttgtggactctgcaagtggatatttggatagcctggaggatttcgttggaagcgggaattcaaatgaaaggtagacagcagcattctcagaaatttctttctgatgtctgcattcaactcatagagttgaacattccctttcagagagcaggtttgaaacactctttctggagtatctggatgtggacatttggagcgctttgatgcctacggtgaaaaagtaaatatcttcccataaaaacgagacagaaggattctgagaaacaagtttgtgatgtgtgtactcagctaacagagtggaacctctcttttgatgcagcagtttggaaacactctttttgtagaaactgtaagtggatatttggatagctctaatgatttcgttggaaacgggaatatcatcatctaaaatctacacagaagccctctcagaaactactttgtgatatctgcattcaagtcacagagttgaacattcgctttcttagagcacgtttgaaacactctttttgtagtgtctggaagtggacatttggcgcactttgatgcctttggtgaaaaagggaatgtcttcccataaaaactagacagataagcattctcagaaacttgtttgtgatgtgtgtacccagctaaaggagttgaacatttctattgatagagcagttttgatacactctttttgtggaaactgcaagtggatatttggatagcttggaggatttcgttggaagcgggaattcaaataaaaggtagacagcaggattctgagaaacaagtttgtgatgtgtgtactcagctaacagagtggaacctttctttttacagagcagctttgaaactctatttttgtggattctgcaaatggatatttagattgctttaacgatatcgctggaaaagggaatatggtcatacaaaatactagacagaaagcattctcacaaacttctttgtgatgtgtgtcctcaactaacagagttgaacctttcttttgatgcagcagtttggaaacactctttttgcagaaactgtaagtggatatttggatagctctaacgatttcgttggaaacgggaatatcatcatctaaaatctagacagaagcactattagaaactacttggtgatatctgcattcaagtcaaagagttgaacattcccttactttaagcacgtttgaaacactcttttggaagaatctggaagtggacatttggagcgctttgatgcctttggtgaaaaggaaacgtcttccaataaaagccagacagaagcattctcagaaacttgtttgtgatgtgtgtacccagccaaaggagttgaacatttctattgatagagcagttttgaaacactctttttgtggattctgcaagtggatatttggattgctttgaagatttcgttggaagcgggaattcgtataaacactagacagcagcattcccagaaatttctttcggatatttccattcaactcatagagatgaacatggcctttcatagagcaggtttgaaacactctttttgtagtttgtggaagtggacatttcgatcgccttgacgcctatggtgaaaaaggaaatatcttcccataaaaaatagacagaattctcagaaacttgtttgtgatgtgtgtcctcaactgacagagttgtacctttctattgatagagtagttttgaaacactctttttgtggaatctgcaagtgaatatttggatagcttggacgatttcgttggaagcgggaattcaaatgaaaggtagacagcagcattctcagaaatttctttctgatgtctgcattcaactcatagagttgaagattccctttcatagagcaggtttgaaacactctttctggagtatctggatgtggacatttggagcgctttgatgcctacggtgagaaagtaaatatcttcccataaaaacgagacagaaggattctgagaaacaagtttgtgatgtgtgtactcagctaacagagtggaacctctctttggatgcagcagtttagaaacactctttttgtagaaactgtaagtggatatttggatagctctaatgatttcgttggaaacgggaatatcatcatctaaaatctagacagaagcactctcagaaactactttgtgatatctgcattcaagtcacagagttgaacattcgctttcttagagcacgtttgaaacactctttttgtagtgtctggaagtggacatttggagcgctttgattcctttggtgaaaaagggaatgtctacccataaaaactaaacagaagaattctcagaaacttgtttgtgatgtgtatcctcaactgacagagttgaaccttgccattgatagaacagctttgaaacactctttttgtggattctgcaagtggatatttggatagcctggaggatttcgttggaagcgggaattcaaataaaaggtagacagcagcattctcagaaatttctttgtgatgtttgcattcaacatatagagttgaacattccctttcatagagcaggtttgaaacactctttctgtactatctggaaatggacatttggaacgctttgatgcctacggtgaaaaagtaaatatcttcccataaaaactagacagaaggattctcagaaacaagtttgtgatgtgtgtactcagctaacagagtggaacctttctttttacagagcagctttgaaactctatttttgtggattcttcaaattgatatttagattgctttaacgatatcgttggaaaagggaatatcgtcatacaaaatctagacagaagcattctcacaaacttctttgtgatgtgtgtcctcaactaacagagttgaaccattcttttgatgcagcagtttggaaacacccttttggtagaaactgtaactggatatttggatagctctaacgatttcgttggaaacgggaatatcatcatctaaaatctagagagaaacactattagaaactgcttggtgatatctgcattcaactcacagaattgaacattcccttactttgagcacgtttgaaacactcttttggaagaatctggaagtggacatttggagcgctttgatgcctttggtgaaaaggaaacgtcttccaataaaagccagacagaagctttctcagaaacttgtttgtgatgtgtgtactcaactaaaagagttgaacctttctattgatagagcagttttgaaacactctttttgtggaatctgcaagtggatatttggattgctttgaggatttcgttggaagcgggaattcataaaaaagtagacagcagaattctcagaaacttgtttgtgatgtgtatcctcaactgacagagttgaaccttgccattgatagagcagttttgaaacactctttttgtggaatctgcaagtggatatttggatagcctggaggatttcgttggaagcgggaattcaaatgaaaggtagacagcagaaatctcagaaacttgtttgtgatgtgtatcctcaactgacagagttgaaccttgccattgatagagcagttttgaaaccctctttttgtggaatctgcaagtagatatttggaaagcctggaggatttcgttggaagcgggaattcaaataaaaggtagacagcagcattctcagaaatttctttgtgatgtttgcattcaactcatagagttgaacattccctttcacagagcaggtttgaaacactctttctgtactatctggatgtggacatttggaacgctttgatgcctacggtgaaaaagtaaatatcttcccataaaaactagacagaaggattctcagaaacaagtttgtgatgtgtgtactcagctaacagagtggaacctctcttttgacgcagcagtttggaaacactctttttgtagaaactgtaagtggatatttggatagctctaatgatttctttggaaacgggaatatcatcatctaaaatctagacagaagcactctcagaaactactttgtgatatctgcattcaagtcacagagttgaacattcgctttcttacagcacttttgaaacactctttttgtagtatctggaagtggacatttggagctctttgatgcctttggcgaaaaaggaaatgtcttcccataaaaactagacagaagcattctcagaaacttgtttgtgatgtgtgtacccagctaaaggagttgaacatttctattgatagagcagttttgaaacactctttttgtggaaaatgcaagtggatatttggatagcttggaggatttcgttggaagcttgaattcaaataaaaggtagacagcagcattctcagaaatttctttctgatgtctgcattcaactcatagagttgaagattccctttcatagagcaggtttgaaacactctttctggagtatctggatgtggacatttggagcgctttgatgcctacggtgaaaaagtaaatatcctcccataaaaacgagacagaaggattctcagaaacaagtttgtgatgtgtgtactcagctaacagagtggaacctttctttttacagagcagctttgaaactctatttttgtggattctgcaaactgatatttagattgctttaacgatatcgttggaaaagggaatatcgtcatacaaaatctggacagaagcattcccacaaacttctttgtgatgtgtgtcctcaactaacagagttgaacctttcttttgatgcagcagtttggaaacactctttttgtagaaactgtaagtggatatttggatagctctaacgatttcgttggaaacgggaatatcatcatctaaaatctagacagaagcactattagaaactacttggtgatatctgcattcaagtcaaagagttgaacattcccttactttgagcacgtttgaaacactcttttagaagaatctggaagtggacatttggagcgctttgatgcctttggtgaaaaggaaacgtcttccaataaaagccagacagaagcattctcagaaacttgtatgtgatgtgtgtactcaactaaaagagttgaacctttctattgatagagcagttttgaaacactctttttgtggaatctgcaagtggatatttggattgctttgaggatttcgttggaagcgggaattcataaaaaagtagacagcagcattcccagaaatttctttcggatatttccattcaactcatagagatgaacattgcctttcatagagcaggtttgaaacactctttttgtagtttgtggaagtggacatttcgatcgccctgatgcctatggtgaaaaaggaaatatcttcccataaaaaatagacagaagcattctcagaaacttgttggtgatatgtgtcctcaactaacagagttgaactgtgccattgatagagagcagttttgaaacactctttttgtggaatctgcaagtggatatttggatagcttggaggatttcgttggaagcgggaattcaaataaaagttagacagcagcattctcagaaatttctttctgatgtctgcattcaactcatagagttgaagattccctttcatagagcaggtttgaaacactctttctggagtatctggatgtggacatttggagcgctttgatgcctacggtgagaaagtaaatatcttcccataaaaacgagacagaaggattctgagaaacaagtttgtgatgtgtgtactcagctaacagagtggaacctttctttttacagagcagttttgaaactctatttttgtggattctgcaaattgatatttagattgctttaacgatatcgttggaaaagggaatatcgtcatacaaaatctagacagaaagcattctcacaaacttctttgtgatgtgtgtcctcaactaacagagttgaacttttcttttgatgcagcagtttggaaacactctttttgtagaaactgtaagtggatatttggatagctctaacgatttcgttggaaacgggaatatcatcatctaaaatctagacagaagcactattagaaactacttggtgatatctgcattcaagtcacggagttgaacattcccttactttgagcacgtttgaaacactcttttggaagaatctggaagtggacatttggagcgctttgatgcctttggtgaaaagcaaacctcttccaacaaaagccagacagaagcattctcagaaacttgttcgtgatgtgtgtactcaactaaaagatttgaacctttctattgatagagcagttttgaaacactctttttgtggattctgcaagtggatatttggattgctttgaggatttcattggaagcgggaattcgtataaaaactagacagcagcattcacagaaatttctttcggatatttccattcaactcatagagatgaacatggcctttcatagggcaggtttgaaacactctttttgtagtttgtggaagtggacatttcgatcgccttgacgcctacggtgaaaaaggaaatatcttcccataaaaaatagacagaagcattctcagaaacttgttggtgatatgtgtcctcaactaacagagttgaactttgccattgatagagagcagttttgaaacactctttttgtggaatctgcaagtggatatttggatagcttggaggatttcgttgcaagcgggaattcaaataaaaggtagacagcaaggattctgagaaacaagtttgtgatgtgtgtactcagctaacagagtggaacctctgttttgatgcagcagtttggaaacactctttttgtagaaactgtaagtggatatttggatagctctaatgatttcgttggaaacgggaatatcatcatctaaaatctagacagaagcactctcagaaactactttgtgatatctgcattcaagtcacagacttgaacattcgctttcttagagcacgtttgaaacactctttttgtagtgtctggaagtggacatttggagcgctttgatgtctttggtgaaaaagggaatgtcttcccataaaaactagacagaagcattctcagagacttgtttgtgatgtgtgtacccagccaaaggagttgaacatttctattgatagagcagttttgaaacactcttgttgtggaaaatgcaggtggatatttggatagcttggaggatttcgttggaagcgggaattcaaataaaaggtagacagcagcattctcagaaactactttctgatgtctgcattcaactcatagagttgaagattccctttcatagagcaggtttgaaacactctttctgtagaatctggatgtggacatttggagcgctttgatacctacggtgaaaaagtaaatatcttcccataaaaactagacagaaggattctgagaaacaagtttgtgatgtgtgtactcagctaacagagtggaacctttctttttacagagcagctttgaaactctatttttgtagattctgcaaattggtatttagattgctttaacgatatcgttggaaaagggaatatcgtcatacaaaatctagacagaagcattctcacaaacttctttgtgatgtgtgtcctcaactaacagagttgaacctttcttttgatgcagcaatttggaaacacccttttggtaggaactgtaactggatatttggatagctctaacgatttcgttggaaacgggaatatcatcatctaaaatctagacagaagcactattagaaactacatggtgatatctgcattcaagtcacagagtagaacattcccttacttcgagcacgtttgaaacactcttttggaagaatctggaagtggacatttggagcgctttgatgcctttggtgaaaaggaaacgtcttccaataaaagccagacagaagcattctgagaaacttgttcgtgatgtgtgtactcaactaaaagagttgaacctttctattgatatagcagttttgaaacactctttttgtggattctgcaagtggatatttggattgctttgaggatttcgttggaagcgggaattcatataaacactagacagcagcattcccagaaattactttcggatatttccattcaactcatagagatgaacatggcctttcatagagcaggtttgaaacactctttttgtagtttgtggaagtggacatttcgatcgccttcacgcctacggtgaaaaaggaaatatcttcccataaaaaatagacagaaagcattctcagaaacttgttggtgatatgtgtcctcaactaacagagttgaactttgccattgatagagagcagttttgaaacactctttttgtggaatctgcaagtggatatttggatagcttggaggatttcgttggaagcgggaattcaaataaaaggtagacagagcattctcagaaatttctttctgatgtctgcattcaactcatagagttgaagattccctttcatagagcaggtttgaaacactctttctgtactatctggatgtggacatttggagcgctttgacgcctacggtgaaaaagtaaatatcttcccataaaaaagagacagaaggattctgagaaacaagtttgtgatgtgtgtactcagctaacaaagtggaacctctcttttgatgcagcagtttggaaacactctttttgtagaaactgtaagtggatatttggatagctctaatgatttcgttggaaacgggaatatcatcatctaaaatctagacagaagccctctcagaaactactttgtgatatctgcattcaagtcacagagttgaacattcgctttcttagagcacgtttgaaacactctttttgtagtttctggaagtggacatttggagcgctttgattcctttggtgaaaaagggaatgtctacccataaaaactagacagaagcattctcagaaacttgtttgtgatgtgtatacccagctaaaggagttgaacatttctattgatagagcagttttgaaacactctttttgtggaaaatgcaaggggatatttggatagcttggaggatttcgttggaagcgggaattcaaataaaaggtagacagcagcattctcagaaatttctttgtgatgtctgcattcaactcatagagttgaagattccctttcatagagcaggtttgaaacagtctttctggagtatctggatgtggacatttggagcgctttgatgcctacggtgaaaaagtaaatatcttcccataaaaacgagacagaaagattctcagaaacaagtttgggatgtgtgaactcagctaacagagtggatcctttctttttacagagcagctttgaaactctatttctgtggattctgcaaattgatatttgggttgatttaacgacatcgttggaaaagggaatatcttcatacaaaatctagacagaagcattctcacaaacttctttgtgacgtgtgtcctcaactaacagagttgaacctttcttttgatgcagcaatttggaaacacccttttggtagaaactgtaactggatatttggatagctgctagcgatttcgttggaaacgggaatatcatcatctaaaatctagacagaagcactattagaaactacttggtgatatctgcattcaagtcacagagtagaacattcccttacttcgagcacgtttgaaacactcttttggaagaatctggaagtggacatttggagcgctttgatgcctttggtgaaaaggaaacgtcttccaataaaagccagacagaagcattctcagaaacttgtttgtgatgtgtgtactcaactaaaagagttgaacctttctattgatagagcagttttgaaacactctttttgtggattctgcaagtggatatttggattgctttgaggatttcgttggaagcgggaattcatataaaatctagacagcagcattcccagaaatttctttcggatatttccattcaactcatagagatgaacatcgcctttcatagagcaggtttgaaacactctttttgtagtttgtggaagtggacatttcgatcgccttgacgcctacggtgaaaaaggaaatatcttcccataaaaaatagacagaattctcagaaacttgtttgtgatgtgtgtcctcaactgacagagttgtacctttctattgatagagtagttttgaaacactctttttgtggaatctgcaagtgaatatttggatagcttggaggatttcgttggaagcgggaattcaaatgaaaggtagaaagcagcattctcagaaatttctttctgatgtctgcattcaactcatagagttgaagattccctttcatagagcaggtttgaaacactctttctgaagtatctggatgtggacatttggagcgctttgatgcctacggtgaaaaagtaaatatcttcccataaaaacgagacagaaggattctcagaaacaagtttgtgatgtgtgtactcagctaacagagtggaacctctcttttgatgcagcagtttggaaacactctttttgtagaaactgtaagtggatatttggatagctctaatgatttcgttggaaacgggaatatcatcatataaaatctagagagaagcactctccagaaactactttgtgatatctgcattcaagtcacagagttgaacattcgctttcttagagcacgtttgaaacactctttttgtagtgtctggaagtggacatttggagcgctttgatgcctttggtgaaaaagggaatgtcttcccataaaaactagacagaagcattctcagaaacttgtttgtgatgtgtgtacccagccaaaggagttgaacatttctattaatagagcagttttgaaacactctttttgtggaaaatgcaggtggatatttggatagcttggaggatttcgttggaagcgggaattcaaataaaagttagacagcagcattctcagaaattactttctgatgtctgcattcaactcatagagttgaagattccctttcatagagcaggtttgaaacactctttctgtagtatctggatgtggacatttggagcgctttgatacctacagtgaaaaagtaaatatcttcccataaaaactagacagaaggattctcagaaacaagtttgtgatgtgtgtactcagctaacagagtggaacctttctttttacagagcagctatgaaactctatttttgtggattctgcaaattgatatttagattgctttaacgatatcgttggaaaagggaatatggtcatacaaaatctagacagaagcattctcacaaactactttgtgacgtgtgtcttcaactaacagagttgaacctttcttttgatgcagcagtttggaaacactctttttgtagaaactgtaagtggatatttggatagctctaacgatttcgttggaaacgggaatatcatcatctaaaatctagacagaagcactattagaaactacttggtgatatctgcattcaagtcacagagttgaacattcccttactttgagcacgtttgaaacactcttttggaagaatctggaagtggacatttggagcgctttgatgcctttggtgaaaaggaaacgtcttccaatacaagccagacagaagcattctcagaaacttgttcgtgatgtgtgtactcaactaaaagagttgaacctttctattgatagagcagttttgaaacactctttttgtggattctgcaagtggatatttggattgctttgaggatttcgttggaagcgggaattcgtataaacactagacagcagcattcccagaaatttctttcggatatttccattcaactcatagagatgaacatggcctttcatagagcaggtttgaaacactcattttgtagtttctggaagtggacatttcgatcgccttgacgcctacggtggaaaaggaaatatcttcccataaaaaatagacagaagcattctcagaaacttgttggtgatatgtgtcctcaactaacagagttgaactttgccattgatagagagcagttttgaaacactctttttgtggaatctgcaagttgatatttggatagcttggaggatttcgttggaagcgggaattcaaataaaaggtagacagcagcattctcagaaatttctttgtgatgtttgcattcaactcatagagttgaacattccctttcatagagcaggtttgaaacaatctttctgtactatctggatgtggacatttggaacgctttgatgcctacggtgaaaaagtaaatatcttcccataaaagctagacagaaggattctgagaaacaagcttgtgatgtgtgtactcagctaacagagtggaacctctcttttgatgcagcagtttggaaacactctttttgtagaaactgtaagtggatatttggatagctctaatgatttcgttggaaacgggaatatcatcatctaaaatctagacagaagccctctcataaactactttgtgatatctgcattcaagtcacagagttgaacattcgctttcttagagcacgtttgaaacactctttttgtagtgtctggaagtggacatttggagcgctttgatgcctttggtgaaaaagtgaatgtcttcccataaaaactagacagaattctcagaaacttgtttgtgatgtgtgtcctcaactgacagagttgtacctttctattgatagagtagttctgaaacactctttttgtggaatctgcaagtgaatatttggatagcttggaggatttcgttggaagcgggaattcaaatgaaaggtagacagcagcattctcagaaattactttctgatgtctgcattcaactcatagagttgaggattccctttcatagagcaggtttgaaaccctctttctgtagtatctggatgtggacatttggagcgctttgatacctacggtgaaaaagtaaatatcttcccataaaaactagacagaaggattctcagaaacaagtttgtgatgtgtgtactcagctaacagagtggatcctttctttttacagagcagctttgaaactctatttctgtggattctgcaaattgatatttgggttgatttaacgacatcgttggaaaagggaatatcttcatacaaaatacagacagaagctttctcagaaacttctttgtgatgtgtgtcctcaactaacagagttgaacctttcttttgatgcactagtttggaaacacactttctgtagaaactgtaagtggatatttgggtaggtctaacgatatcgttggaaacgggaatatcttcatctaaagtatacacagaagcactattagacactgcttggtgatatctgcattcaagtcacagagttgaacattcccttactttgagcacgtttgaaacactcttttggaagaatctggaagtggacatttggagcgctttgatgcctttggtgaaaaggaaacgtcttccaataaaagccagacagaagcattctcagaaacttgtttgtgatgtgtgtactcaactaaaagagttgaacctttctattgatagagcagttttgaaacactctttttgtggattctgcaagtggatatttggattgctttgaggatttcgtggaagcgggaattcgtataaaaactagacagcagcattcccagaaatttctttcggatatttccattcaactcatagagatgaacatggcctttcatagagcaggtttgaaacactcttttggtagtttgtggaagtggacattttgatcgccttgacgcctacggtgaaaaaggaaatatcttcccataaaaaatagacagaagcattctcagaaacttgttggtgatatgtgtcctcaactaacagagttgaactttgccattgatagagagcagttttgaaacactctttttgtggaatctgcaagtggatatttggatagcttggaggatttctttggaagcgggaattcaaataaaaggtagacagcagcattctcagaaatttctttgtgatgtttgcattcaactcatagagttgaacattccctttaatagagcaggtttgaaacactctttctgtactatgtggatgtggacatttggagcgctttgacgcctacggtgaaaaaggaaatgtcttcccataaaaaattgaagaaggattctgagaaacaagtatgtgatgtgtgtactcagctaacagagtggaacctttctttttacagagcagctttgaaactctatttttgtggattctgcaaatggatatttagattgctttaacgatatcgttggaaaagggaatatcgtcatacaaaatctagacagaagcattctcacaaacttctttgtgatgtgtgtcctcaactaatagagttgaacctttcttttgatgcagcagtttggaaacacccttttggtaggaactgtaactggatatttggatagctctaacgatttcgttggaaacgggaatatcatcatctaaaatctagacagaagcactattagaaactacttggtgatatctgcattcaagtcacagagttgaacattcccttactttgagcacgtttcaaacactcttttggaagaatctggaagtggacatttggagcgctttgatgatgcctttggtgaaaaggaatcgtcttccaataaaagccagacagaagcattctcagaaacttgttcgtgatgtgtgtactcaactaaaagatttgaacctttctattgatagagcagttttgaaacactctttttgtggattctgcaagtggatatttggattgcattgaggatttcgttggaagcgggaattcgtataaaaactggacagcagcattcccagaaatttctttcggatatttccattcaactcatagagatgaacatggcctttcatagagcaggtttgaaacactctttttgtagtttgtggaagtggacatttcgatcgccttgacgccaacggtgaaaaaggaaatatcttcccataaaaaatagacagaagcattctcagaaacttgttggtgatatgtgtcctcaactaacagagttgaactttgccattgatagagagcagttttgaaacactctttttgtggaatctgcaagtggatatttggatagcttggaggatttcgttggaagcgggaattcaaattaaaggtagacagcaaggattctgagaaacaagtttgtgatgtgtgtactcagctaacagagtggaacctctgttttgattcagcagtttggaaacactctttttgtagaaactgtaagtggatatttggatagctctaatgatttcgttggaaaagggaatatcatcatctaaaatctagacagaagcactctcagaaactactttgtgatatctgcattcaagtcacagagttgaacattcgctttcttagagcacttttgaaacactctttttgtagtatctggaagtggacatttggagctctttgatgcctttggtgaaaaaggaaatgtcttcccataaaaactaggcagaagcattctcagaaacttgtttgtgatgtgtgtacccagcgaaaggagttgaacatttctattgatagagcagttttgaaacactctttttgtggaatctgcaagtggatatttggatagcttggaggttttcgttggaagcaggaattcaaataaaaggtagacagcagcattctcagaaatttctttctgatgtctgcattcaactcatagagttgaagattccctttcctagagcaggtttgaaacactctttctggagtatctggatgtggacatttggagcgcttggatgcctacggtgaaaaagtaaatatcttcccataaaaacgagacagaaggattctcagaaacaagtttgtgatgtgtgtactcagctaacagagtggaacctctcttttgaagcagcagtttggaaacactctttttgtagaaactgtaagtggatatttggatagctctaatgatttcgttggaaacgggaatatcatcatctaaaatctagacagaagcactctcagaaactactttgtgatatctgcattcaagtcacagagttgaacattcgctttcttagagcacttttgaaacactctttttgtcgtatctggaagtggacatttggagctctttgatgcctttggtgaaaaaggagatgtcttcccataaaaactagacagaagctttctcagaaacttgtttgtgatgtgtgtacccagcgaaaggagttgaacatttctattgatagagcatttttgaaacactctttttgtggaatctgcaagtggatatttggatagcttgtaggttttcgttggaagcgggaattcaaataaaaggtagacagcagcattctcagaaatttctttctgatgtttgcattcaactcatagagttgaacattccctttaatagagcaggtttgaaacactctttctgtagtatctggatgtggataattggagcgctttgacgcctacggtgaaaaaggaaatgtcttcccataaaaaattgaagaaggattctgagaaataagtttgtgatgtgtgtactcagctaacagagtggaacctctcttttgatgcagcagtttggaaacactctttttgtagaaaccgtaagtggatatttggatagctctaatgatttcgttggaaacgggaatatcatcatctaaaatctagacagaagccctctcagaaactactttgtgatatctgcattcaagtcagagagttgaacattcgctttcttagagcacgtttgaaacactctttttgtagtgtctggaagtggacatttggagcgctttgatgcctttggtgaaacagggaatgtcttcccataaaaactagacagaagcattctcagaaacttgtttgtgatgtgtgtacccagccaaaggagttgaacatttctattgatagagcagttttgaaacactctttttgtggaaaatgcaggtggatatttggatagcttggaggatttcgttggaagcgggaatttcaaataaaagttagacagcaggattctgagaaacaagtttgtgatgtgtgtactcagctaacagagtggaacctctctttttacagagcagctttgaaactctatttttgtggattctgcaaatggatatttagattgctttaacgatatcgctggaaaagggaatatggtcatacaaaatctagacagaagcattctcacaaacttctttgtgatgtgtgtcctcaactaacagagttgaacctttcttttgatgcagcagtttggaatcacccttttggtagaaactgtaactggatatttggatagctctaacgatttcgttggaaacgggaatatcatcatctaaaatctagacagaagcactattagaaactacttggtgatatctgcattcaagtcacagagttgaacattcccttacttcgagcacgtttgaaacactcttttggaagaatctggaagtggacatttggagccctttgatgcctttggtgaaaaggaaacgtcttccaataaaagccagacagaagcattctcagaaacttgttcgtgatgtgtgtactcaactaaaagagttgaacctttctattgatagagcagttttgaaacgctctttttgtggattctgcaagtggatatttggattgctttgaggatttcgttggaagcgggaattcgtataaacactagacagcagcattcccagaaatttctttcggatatttccattcaactcatagagatgaacatggcctttcatagagcaggtttgaaacactctttttgtagtttgtggaagtggacatttcgatcgccttgacgcctacggtgaaaaaggaaatatcttcccataaaaaatagacagaagcattctcagaaacttgttggtgatatgtgtcctcaactaacagagttgaactttgccattgatagagagcagttttgaaacactctttttgtggaatctgcaagtggatatttggatagcttggaggatgtcgttggaagcgggaattcaaattaaaggtagacagcagcattctcagaaatttctttctgatgtccgcattcaactcatagagttgaacattccctttcatagagcaggtttgaaacactctttctggagtatctggatgtggacatttggagcgctttgatgcctacggtgaaaaagtaaatatcttcccataaaaacgagacagaaggattctgagaaacaagtttgtgatgtgtgtactcagctaacagagtggaacctctcttttgatgcagcagtgtggaaacactctttttgtagaaactgtaagtggatatttggatagctctaatgatttcgttggaaacgggaatatcatcatctaaaatctagacagaagccctctcaaaaactactttgtgatatctgcattcaagtcacagagttgaacattcgctttcttagagcacgtttgaaacactctttttgtagtgtctggaagtggaaatttggagcgctttgatgcctttggtgaaaaagggaatatcttcccataaaaactagacagaagctttctcagaaacttgtttgtgatgtgtgtacccagcgaaaggagttgaacatttctattgatagagcagttttgaaacactctttttgtggaatctgcaagtggatatttggatagcttgtaggttttcgttggaagcgggaattcaaataaaaggtagacagcaagcattctcagaaatttctttctgatgtctgcattcaactcatacagttgaagattccctttcatagagcaggtttgaaacactcgttctggagtatctggatgtggacatttggagcgctttgatgcctacggtggaaaagtaaatatcttcccataaaaacgagacagaaggattctcagaaacaagtttgtgatgtgtgtactcagctaacagagtggaacctttctttttacagagcagctttgaaactctatttttgtggattctgcaaattgatatttagattgctttaacgatatcgttggaaaacggaatatcgtcatacaaaatctagacagaagcattctcacaaacttctttgtgatgtgtgtcctcaactaacagagttgaacctttcttttgatgcagcaatttggaaacacccttttggtagaaactgtaactggatatttggatagctctaacgatttcgttggaaacgggaatatcatcatctaaaatatagacagaagcactattagaaactacttggtgatatctgcattcaagtcacagagttgaacattcgcttactttgagcacgtttgaaacactcttttggaagaatctggaagtggacatttggagcgctttgatgcctttggtgaaaaggaaacgtcttccaataaaagccagacagaagcattctcagaaacttgttcgtgatgtgtgtactcaactaaaagagttgaacctttctattgatagagcagttttgaaacactctttttgtggattctgcaagtggatatttggattgctttgaggatttcgttggaagcgggaattcgtataaacactagacagcagcattcccagaaatttctttcggatatttccattcaactcatagagatgaacatggcctttcatattgaaacactctttttgtagtttgtggaagtagacatttcgatcaccttgacgcctgcggtgaaaaaggaaatatcttcccataaaaaatagacagaagcattctcagaaacttgttggtgatatgtgtcctcaactaacagaattgaactttgccattgatagagagcagttttgaaacactctttttgtggaatctgcaagtggatatttggatagcttggaggatttcgttggaagcgggaattcaaataaaaggtagacagcagcattctcagaaatttctttctgatgtctgcattcaactcatagagttgaagattccctttcatagagcaggtttgaaacactctttctggagtatctggatgtggacatttggagcgctttgatgcctacggtgagaaagtaaatatcttcccataaaaacgagacagaaggattctgagaaacaagtttgtgatgtgtgtactcagctaacagagtggaacctctcttttgatgcagcagtttggaaacactctttttgtagaaactgtaagtgtttatttggatagctctaatgatttcgttggaaacgggaatatcatcatctaaaatctagacagaagcactctcagaaactacttgttgatatctgcattcaagtcacagagttgaacattcgctttcttagagcacttttgaaacactctttttgtagtatctagaagtggacatttggagctctttgatgcctttggtgaaaaaggaaatgtcttcccataaaaactagacagaagcattctcaggaaacttgtttgtgatgtgtgtacccagccaaaggagttgaacatttctattgatagagcagttttgaaacactcttgttgtggaaaatgcaggaggatatttggatagcttggaggatttcgttggaagcgggaattcaaataaaaggtagacagcaggattctgagaaacaagtttgtgatgtgtgtactcagctaacagagtggaacctttctttttacagagcagctttcaaactctatttttgtggattctgcaaattgatatttagattgctttaacgatatcgttggaaaagggaatatcctcatacaaaatctagacagaagcattctcacaaacttctttgtgatgtgtgtcctcaactaacagtagttgaacctttcttttgatgcagcaatttggaaacacccttttggtagaaactgtaactggatatttggatagctctaacgatttcgttggaaacgggaatatcatcatctaaaatgtagacagatctagaaactacttggtgatatctgcattcaagtcaaagagttgaacattcccttactttgagcacgtttgaaacactcttttggaagaatctggaagtggacatttggaacgctttgatgcctttggtgaaaaggaaacgtcttccaataaaagccagacagaagccttctcagaagcttgttcgtgatgtgtgtactcaactaaaagagttgaacctttctattgatagagcagttttgaaacactctttttgtggattctgcaagtggatatttggattgctttgaggatttcgttggaagcgggaattcgtataaacactagacagcagcattcccagaaatttctttcggatatttccattcaactcatagaggtgaacatggcctttcatacagcaggtttgaaacactctttttgtagtttgtggaagtggacatttcaatcgccttgatgcctacggtgaaaaaggaaatatcttcccataaaaaatagacagaagcattctcagaaacttgttggtgatatgtgtcctcaactaacagagttgaactttgccattgatagagagcagttttgaaacagtctttttgtggaatctgcaagtggatatttggatagcttggaggatttcgttggaagcgggaattcaaataaaaggtagacagcagcattctcagaaatttctttctgatgtctgcattcaactcatagagttgaagattccctttcatagagcaggtttgaaacactcgttctggagtatctggatgtggacatttggagcgctttgatgcctacggtgcaaaagtaaatatcttcccataaaaacgagacagaaggattctcagaaacaagtttgtgatgtgtgtactcagctaacagagtggaacctctcttttgatgcagcagtttggaaacactctttttgtagaaactgtaagtggatatttggaaagctctaatgatttcattggaaacgggaatatcatcatctaaaatctagactgaagcactctcagaaactactttgtgatatctgcattcaagtcacagagttgaacattcgctttcttagagcacttttgaaacactctttttgtagtatctggaagtggacatttggagctctttgatgcctttggtgaaaaaggaaatgtcttcccataaaagctagacagaagcattctcagaaacttgtttgtgatgtgtgtacccagcgaaaggagttgaatatttctattgatagagcagttttgaaacactctttttgtggaatctgcaagtggatatttggatagcttggaggttttcattggaagcgggaattcaaataaaagatagacagcagcattctcagaaatttctttctgatgtctgcattcaactcatagagttgaagattcccgttcatagagcaggtttgaaacactcgttctggagtatctggatgtggacatttggagcgctttgatgcctacggtggaaaagtaaatatcttcccataaaaacgagacagaaggattctcagaaacaagtttgtgatgtgtgtactcagctaacagagtggatcctttctttttacagagcagctttgaaactctatttctgtggattctgcaaattgatatttgggttgatttaacgatatcgttggaaaagggaatatcttcatacaaaatctagacagaagcattctcacaaacttctttgtgatgtgtgtcctcaactaacagagttgaacctttcttttgatgcagcaatttggaaacacccttttggtagaaactgtaactggatatttggatagctctagcgatttcgttggaaacgggaatatcatcatctaaaatctagacagaagcactattagaaactacttggtgatatctgcattcaagtcaaagagttgaacattcccttactttgagcacgtttgaaacactcttttggaagaatctggaagtggacatttggagcgctttgatgcctttggtgaaaaggaaacgtcttccaataaaagccagacagaagcattctgagaaacttgtccgtgatgtgtgtactcaactaaaagagttgaacctttctattgatagagcagttttgaaacactctttttgtggattctgcaagtggatatttggattgctttgaggatttcgttggaagcgggaattcgtataaacactagacagcagcattcccagaaatttctttcggatatttccattcaactcatagagatgaacatggcctttcatagagcaggtttgaaacactctttctgtagtttgtggaagtggacatttcgatcgccttgacgcctacggtgaaaaaggaaatatcttcccataaaaaatagacagaagaattctcagaaacttgtttgtgatgtgtgtcctcaactgacagagttgtacctttctattgatagagtagttttgaaacactctttttgtggaatctgcaagtgaatatttggatagcttggaggatttcgttggaagcgggaattcaaatgaaaggtagacagcagcattctcagaaatttctttctgatgtctgcattcaactcatagagttgaagattccctttcatagagcaggtttgaaacactctttctggagtatctggatgtggacatttggagcgctttgatgcctacggtgaaaaagtaaatatcttcccataaaaacgacacagaaggattctgagaaacaagtttgtgatgtgtgtactcagctaacagagtggaacctctcttttgatgcagtagtttggaaacactctttttgtagaaactgtaagtggatatttggatagctctaatgatttcgttggaaacgggaatatcatcatctaaaatctagagagatgccctctcagaaactactttgtgatatctgcattcaagtcacagagttgaacattcgctttcttagagcacgttggaaacactctttttgtagtgtctggaagtggacatttggagcgctttgatgcctttggtgaaaaagggaatgtcttcccataaaaactagacagaagcattctcagaaacttgtttgtgatgtgtgtacccagctaaaggagttgaacatttctattgatagagcagttttgaaacactctttttgtggaaaatgcaagtggatatttggagagcttggaggatttcgttggaagcgggaattcaaataaaaggtagacagcagcattctcagaaatttctttctgatgtctgcattcaactcatagagttgaagattccctttcatagagcagatttgaaacactctttctggagtatctggatgtggacatttggagcgctttgatgcctacggtgaaaaagtaaatatcttcccataaaaacgagacagaaggattctcagaaacaagtttgtgatgtgtgtactcagctaacagagtggaacctttctttttacagagcagctttgaaactctatttttgtggattctgcaaatggatatttagattgctttaatgatatcgctggaaaagggaatatggtcatacaaaatctagacagaagcattctcacaaacttctttgtgatgtgtgtcctcaactaacagagttgaagctttcttttgatgcagcagtttggaaacacccttttggtagaaactgtaagtggatatttggatagctctaacgatttcgttggaaacgggaatatcatcatctaaaatctagacagaagcactattagaaactacttggtgatatctgcattcaagtcaaagagttgaacattcccttactttcagcacgtttgaaacactcttttggaagaatctggaagtggacatttggagcgctttgatgcctttggtgaaaaggaaacgtcttccaataaaagccagacagaagcattctcagaaacttattcgtgatgtgtgtactcaactaaaagagttgaacctttctattgatagagcagttttgaaacactctttttgtggattctgcaagtggatatttggattgctttgaggatttcgttggaagcgggaattcgtataaacactagacagcagcattcccagaaatttctttcggatatttccattcgactcatagagatgaacatggcctttcatagagcaggtttgaaacactctttttgtagtttgtggaagtggacatttcgatcgccttgacgcctacggtgaaaaaggaaatatcttcccataaaaaatagacagaagcattctcagaaacttgttggtgatatgtgtcctcaactaacagagttgaactttgccattgatagagagcagttttgaaacactctttttgtggaatctgcaagtggatatttggataccttggaggatttcgttggaagcgggaattcaaataaaaggtagacagcagcattctcagaaatttctttctgatgtctgcattcaagtcatagagttgaagattccctttcatagagcaggtttgaaacactctttctggagtatctggatgtggacatttggagcgctttgatgcctacggtgagaaagtaaatatcttcccataaaaacgagacagaaggattctaagaaacaagtttgtgatgtgtgtactcagctaacagagtggaacctctcttttgatgcagcagtttggaaacactctttttgtagaaactgtatgtggatatttggatagctctaatgatttcattggaaacgggaatatcatcatctaaaatctagacagaagcactctcagaaactactttgtgatatctgcattcaagtcacagagttgaacattccctttcttagagcacgtttgaaagactctttttgtagtgtctggaagtggacatttggagcgctttgattcctttggtgaaaaagggaatgtctacccataaaaactagacagaagcattctcagaaacttgtttgtgatgtgtgtacccagctaaaggagttgaacatttctattgatagagcagttttgaaacactctttttgtggaaaatgcaagtggatatttggattgcttgggggatttcgttggaagcgggaattcaaataaaaggtagacagcagcattctcagaaatttctttctgatgtctgcattcaattcatagagttgaagattccctttcatagagcaggtttgaaacactcgttctggagtatctggatgtggacatttggagcgctttgatgcctacggtggaaaagtaaatatcttcccataaaaacgagacagaaggattctgagaaacaagtttgtgatgtgtgtactcagctaacagagtggaacctttctttttacagagcagctttgaaactctatttctgtggattctgcaaattgatatttagattgctttaacgatatcgttggaaaagggaatatcgtcatacaaaatctagacagaagcattctcacaaacttctttgtgatgtgtgtcctcaactaacagagttgaacctttcttttgatgcagcaatttggaaacagccttttggtagaaactgtaactggatatttggatagctctaacgatttcgttgtaaacgggaatatcatcatctaaaatctagacagaagcactattagaaactacttggtgatatctgcattcaagtcacagagtagaacattcccttacttcgagcacgtttgaaacactcttttggaagaatctggaagtggacatttggagcgctttgatgcctttggtgaaaaggaaacgtcttccaataaaagccagacagaagcattctcagaaacttgttcgtgatgtgtgtactcaactaaaagagttgaacctttctattgatagagcagttttgaaacactctttttgtggattctgcaagtggatatttggattgctttgaggatttcgttggaagcgggaattcgtataaacactagacagcagcattcccagaaatttctttcggatatttccattcaactcatagagatgaacatggcctttcatagagcaggtttgaaacactctttttgtagtttgtggaagtggacatttcgatcgccttgacgcctacggtgataaaggaaatatcttcccataaaaaatagacagaagcattctcagaaacttgttggtgatatgtgtcctcaactaacagagttgaactttgccattgatagagagcagttttgaaacactctttttgtggaatctgcaagtggatatttggatagcttggaggatttcgttggaagcgggaattcaaataaaaggtagacagcagcattctcagaaatttctttctgatgtctgcattcaactcatagagttgaagattccctttcatagagcaggtttgaaacactctttctggagtatctggatgtggacatttggagcgctttgatgcctacggtggaaaagtaaatatcttcccataaaaacgagacagaaggattctgagaaacaagtttgtgatgtgtgtactcagataacagagtggaacctctcttttgatgcagcagtttggaaacactctttttgtagaaactgtaagtggatatttggatagctctaatgatttcgttggaaacgggaatatcatcatctaaaatctagacagaagcactctcagaaactactttgtgatatctgcattcaagtcacagagttgaacattcgctttcttagagcacgtttgaaacactctttttgtagtgtctggaagtggacatttggagcgctttgatggctttggtgaaaaagggaacgtcttcccataaaaactagacagaagcattctcagaaacttgtttgtgatgtgtgtacccagctaaaggagttgaacatttctattgatagagcagttttgatacactctttttgtggaaactgcaagtggatatttggatagcttggaggatttcgttggaagcgggaattcaaataaaaggtagacagcagcattctcagaaatttctttctgatgtctgcattcaactcatagagttgaagattccctttcatagagcaggtttgaaacactctttctggagtatctggaagtggccatttggaccgctttgatgcctacggtgaaaaactaaatatgttcccataaaaacgagacagaaggattctcagaaacaagtttgtgatgtgtgtactcagctaacagagtggaacctttctttttacagagcagctttgaaactctatttttgtggattctgcaaattgatatttagattgctttaacgatatcgttggaaaagggaatatcgtcatacaaaatctagaaagaagcattctcacaaacttctttgtgatgtgtgtcctcaactaacagagttgaacctttcttttgatgcagcaatttggaaacacccttttggtagaaactgtaactggatatttggatagctctaaagatttcgttggaaacgggaatatcatcatctaaaatctagacagaagcactattagaaactacttggtgatatctgcattcaagtcacagagttgaacattcccttactttgagcacgtttgaaacactcttttggaagaatctggaagtggacatttggagcgctttgatgcctttggtgaaaaggaaacgtcttccaataaaagccagacagaagcattctcagaaacttgtttgtggtgtgtgtactcaactaaaagagttgaacctttctattgatagagcagttttgaaacactctttttgtggattctgcaagtggatatttggattgctttgaggatttcgttggaagcgggaattcgtataaaaactagacagcagcattcccagaaatttctttcggatatttccattcaactcatagagatgaacatggcctttcatagagcaggtttgaaacactctttttgtagtttgtggaagtggacatttcgatcgccttgacgcctacggtgaaaaaggaaatatcttcccataaaaaatagacagaagcattctcagaaacttgttggtgatatgtgtcctcaactaacagagttgaactttgccattgatagagagcagttttgaaacactctttttgtggaatctgcaagtggatatttggatagcttggaggatttcgttggaagcgggaattcaaataaaaggtagacagcagcattctcagaaatttctttctgatgtctgcattcaactcatagagttgaacattccctttcatagagcaggtttgaaacactctttctggagtatctggatgtggacatttggagcgctttgatgcctacggtgaaaaagtataatcttcccataaaaacgagacagaaggattctcagaaagaagtttgtgatgtgtgtactcagctaacagagtggaacctctcttttgaagcagcagtttggaaacactcgttttgtagaaactgtaagtggatatttggatagctctaatgatttcgttggaaacgggaatatcatcatctaaaatctagacagaagccctctcagaaactactttgtgatatctgcattcaagtcacagagttgaacattcgctttcttagagcacgttggaaacactctttttgtagtgtttggaagtggacatttggagcgctttgatgcctttggtgaaaaagggaatgtcttcccataaaaactagacagaagcattctcagaaacttgtttgtgatgtgtgtacccagctaaaggagttgaacatttccattgatagagcagttttgaaacactctttttgtggaaaatgcaagtggatatttggatagcttggaggatttcgttggaagcgggaattcaaataaaaggtagacagcagcattctcagaaatttctttctgatgtctgcattcaactcatagagttgaagattccctttcatagcagcaggtttgaaacactctttctggagtatctggatgtggacatttggagcgctttgatgcctacggtgaaaaagtaaatatcttcccagaaaaacgagacagaaggattctgagaaacaagtttgtgatgtgtgtactcagctaacagagtggaacctttctttttacagagcagctttgaaactctatttttgtggattctgcaaatggatatttagattgatttaatgttatcgctggaaaagggaatatggtcatacaaaatctagatagaagcattctcacaaacttctttgtgatgtgtgtcctcaactaacagagttgaacctttcttttgatgcagcagtttggaaacacccttttggtagaaactgtaagtggatatttggatagctctaactatttcattggaaacgggaatatcatcatctaaaatctagacagaagcactattagaaactacttggtgatatctgcattcaagtcacagagttgaacattcccttactttgagcacgtttgaaacactcttttggaagaatctggaagtggacatttgcagcgctttgatgcctttggtgaaaaggaaacgtcttccaataaaagccagacagaaacattctcagaaacttgtttgtgatgtgtgtactcaactaaaagagttgaacctttctattgatagagcagttttgaaacactctttttgtggattctgcaagtggatatttggattgctttgaggatttcgttggaagcgggaattcgtataaacactagacagcagcattcccagaaatttctttcggatatttccattcaactcatagagatgaacatggcctttcatagagcaggtttgaaacactctttttgtagtttgtggaagtggacatttcgatcgccttgacgcctacggtgaaaaaggaaatatcttcccataaaaaatagacagaagcattctcagaaacttgttggtgatatgtgtcctcaactaacagagttgaactttgccattgatagagagcagttttgaaacactctttttgtggaatctgcaagtggatatttggatagcttggaggatttcgttggaagcgggaattcaaataaaaggtagacagcaggattctcagaaacaagtttgtgatgtgtgtactcagctaacagagtggatcctttctttttacagagcagctttgaaactctatttctgtggattctgcaaattgatatttgggttgatttaacgacatcgttggaaaagggaatatcttcatacaaaatccagacagaagcattctcagaaacttctttctgatgtctgtcctcaactaacagagttgaacctttcttttgatgcagaagtttggaaacactctttttgtagaaactgtaagtggatatttggataggtctaacgatatcgttggaaacgggaatatcttcatctaaagtatacacagaagcactattagaaactactgggtgatatctgcattcaagtcacagagttgaacattcccttactttgagcacgtttcaaacactcttttgtaagaatctggaagtggacatttggagcgctttgatgcctttggtgaaaaggaaacgtcttccaataaaagccagacagaagcattctcagaaacttgttcgtgatgtgtgtactcaactaaaagagttgaacctttctattgatagagcagttttgaaacactctttttgcggattctgcaagtggatatttggattgctttgaggatttcgttggaagcgggaattcgtataaacactagacagcagcattcccagaaatttctttcggatatttccattcgactcatagagatgaacatggcctttcatagagcaggtttgaaacactctttttgtagtttgtggaagtggacatttcgatcgccttgacgcctacggtgaaaaaggaaatatcttcccataaaaaatagacagaagcattctcagaaacttgttggtgatatgtgtcctcaactaacagagttgaactttgccattgatagagagcagttttgaaacactctttttgtggaatctgcaagtgaatatttggatagcttggaggatttcgttggaagcgggaattcaaataaaaggtagacagcagcattctcagaaatttctttctgatgtctgcattcaactcatagagttgaacattccctttcataggacaggtttgaaatactctttctgtagtatctggatgtggacatttggagcgctttgatgcctacggtgagaaagtaaatctcttcccataaaaacgagacagaaggatactcagaaacaagtttgtgatgtgtgtactcagctaacagagtggaacctctcttttgatgcagcagtttggaaacactctttttgtagaaactgtaagtggatatttggatagctctaatgatttcgttggaaacgggaatatcatcatctaaaatctagacagaagtcctctcagaaactactttgtgatatctgcattcaagtcacagagttgaacattcgctttcttagagcacgtttgaaacactctttttgtagtgtctggaagtggacatttggagcgctttgatgcctttggtgaaaaagggaacgtcttcccataaaaactagacagaaacattctcagaaacttgtttgtgatgtgtgtacccagccaaaggagttgaacatttctattgatagagcagttttgaaacactctttttgtggaaaatgcaggtggatatttggatagcttggaggatttcgttggaagcgggaattcaaataaaaggtagacagcagcattctcagaaatttctttgtgatgtttgcattcaactcatagagttgaacattccctttaatagagcaggtttgaaacactctttctgtactatctggatgtggacagttggagcgctttgacgcctacggtgaaaaaggaaatgtcttcccataaaaaattgaagaaggattctgagaaacaagtttgtgatgtgtgtactcagctaacagagtggaacctttctttttacagagcagctttgaaactctatttttgtggattctgcaaatcgatatttagattgctttaacgatatcgttggaaaagggaatatcgtcatacaaaatctagacagaagcattctcacaaacttctttgtgatgtgtgtcctcaactaacagagttgaacctttcttttgatgcagcaatttgcaaacacccttttggtagaaactgtaactggatatttggatagctctaacgatttcgttggaaacgggaatatcatcatctaaaatgtagacagaagcactattagaaactacttggtgatatctgcattcaagtcacagagtagaacattcccttacttcgagcacgtttgaaacactcttttggaagaatctggaagtggacatttggagcgctttgatgcctttggtgaaaaggaaacgtcttccaataaaagccagacagaagcattctcagaaacttgttcgtgatgtgtgtactcaactaaaagcagttgaacctttctattgatagagcagttttgaaacactctttttgtggattctgcaagtggatatttggattgctttgaggatttcgttggaagcgggaattcatataaaaactagacagcagcattcccagaaatttctttcggatatttccattcaactcatagagatgaacatcgcctttcatagagcaggtttgaaacactctttttgtagtttgtggaagtggacatttcgatcgccttgacgcctacggtgaaaaaggaaatatcttcccataaaaaatagacagaagcattctcagaaacttgttggtgatatgtgtcctcaactaacagagttgaactttgccattgatagagagcagttttgaaacactctttttgtggaatctgcaagtggatatttggatagcttggaggatttcgttggaagcgggaattcaaataaaaggtagacagcatcattctcagaaatttctttctgatgtctgcattcaactcatagagttgaagattccctttcatagagcaggtttgaaacactcgttctggagtatctggatgtggacatttggagcgctttgatgcctacggtggaaaagtaaatatcttcccataaaaacgagacagaaggattctgagtaaacaagtttgtgatgtgtgtactcagctaacagagtggaacctctcttttgatgcagcagtttggaaactctctttttgtagaaactgtaagtggatatttggatagctctaatgatttcgttggaaacgggaatatcatcatctaaaatctagacagaagccctctcagaaactactttgtgatatctgcattcaagtcacagagttgaacattcgctttcttagagcacgttggaaacactctttttgtagtgtctggaagtggacatttggagcgctttgatgcctttggtgaaaaagggaatgtcttcccataaaaactagacaaaagcattctcagaaacttgtttgtgatgtgtgtacccagccaaaggagttgaacatttctattgatagagcagttttgaaacactcttgttgtggaaaatgcaagtggatatttggatagcttggaggatttcgttggaagcgggaattcaaataaaaggtagacagcagcattctcagaaatttctttctgatgtctgcattcaactcatagagttgaagattccctttcgtagagcaggtttgaaacactcgttctggagtatctggatgtggacatttggagcgctttgatgcctacggtggaaaagtaaatatcttcccataaaaacgagacagaaggattctcagaaacaagtttgtgatgtgtgtactcagctaacagagtggaacctttctttttacagagcagctttgaaactctatttttgtggattctgcaaattgatatttagattgctttaacgatatcgttggaaaagggaatatggtcatacaaaatctagacagaagcattctcacaaacttctttgtgatgtgtgtcctcaactaacagagttgaacctttcttttgatgcagcagtttggaaacactctttttgtagaaactgtaagtgcattattggatagctctaacgatttcgttggaaacgggaatatcatcatctaaaatctagacagaagcactattagaaactacttggtgatatctgcattcaagtcacagagttgaacattcccttactttgagcacgtttgaaacactcttttggaagaatctggaagtggacatttggagcgctttgatgcctttggtgaaaaggaaacgtcttccaataaaagccagacagaagcattctcagaaacttgttcgtgatgtgtgtactcaactaaaagagttgaacctttctattgatagagcagttttgaaacactctttttgtggattctgcaagtggatatttggattgctttgaggatttcgttggaagcgggaattcatataaacactagacagcagcattctcagaaatttcttcctgatgtttgcattcaactcatagagttgaacattccctttaatagagcaggtttgaaacactctttctgtactatctggatgtggacatttggagcgctttgatgcctacggtgaaaaaggaaatgtcttcccataaaaaattgaagaattctcagaaacttgtttgtgatgtgtgtcctcaactgacacagttgtacctttctattgatagagtagttttgaaacactctttttgtggaatctgcaagtgaatatttggatagcttggaggatttcgttggaagcgggaattcaaatgaaaggtagacagcagcattctcagaaattactttctgatgtctgcattcaactcatagagttgaagattccctttcatagagcaggtttgaaacactctttctgtagtatctggatgtggacatttggagcgctttgatacctacggtgaaaaagtaaatatcttcccgtaaaaactagacagaaggattctgagaaacaagtttgtgatgtgtgtactcagctaacagagtggaacctctcttttgatgcagcagtttggaaacactctttttgtagaaactgtacgtggatatttggatagctctaatgatttcgttggaaacgggaatatcatcatctaaaatctagacagaagccctctcagaaactacattgtgatatctgcattcaagtcacagagttgaacattcgctttcttagagcacgtttgaaacactctttttgtagtgtctggaagtggacatttggagcgctttgatgcctttggtgaaaaagggaatgtcttcccataaaaactagacagaagcattctcagaaacttgtttgtgatgtgtgtacccagctaaaggagttgaacatttctattgatagattagttttgaaacactctttttgtggaaaatgcaagtggatatttggatagcttggaggatttcgttggaagcgggaattcaaataaaaggtagacagcagcattctcagaaatttctttctgatgtctgcattcaactcatagagttgaagattccctttcatagagcaggtttgaaacactctttctggagtatctggatgtggacatttggagcgctttgatgcctacggtgaaaaagtaaatatcttcccataaaaactagacagaaggattctcagaaacaagtttgtgatgtgtgtactcagctaaaagagtggaacctttctttttacagagcagctttgaaactctatttttgtggattctgcaaattgatatttagattgctttaacgatatcgttggaaaagggaatatcgtcatacaaaatctagacaggaagcattctcacaaacttctttgtgatgtgtgtcctcaactaacagagttgaacctttcttttgatgcagcagtttggaaacactctttttgtagaaactgtaagtggatatttggatagctctaacgattttgttggaaacggtaatatcatcatctaaaatctagacagaagcactattagaaactacttggtgatatctgcattcaagtcacagagttgaacattcccttactttgagcacctttcaaacactcttttggaagaatctggaagtggacatttggagcgctttgatgcctttggtgaaaaggaaacgtcttccaataaaagccagacagaagcattctcagaaacttgttcgtgatgagtgtactcaactaaaagatttgaacctttctattgatagagcagttttgaaacactctttttgtggattcttcaagtggatatttggattgctttgaggatttcgttggaagcgggaattcgtataaaaactatacagcagcattcccagaaatttctttcggatatttccattcgactcatagagatgaacatggcctttcatagagcaggtttgaaacacactttttgtagtttgtggaagtggacatttcgatcgccttgacgcctacggtgaaaaaggaaatatcttcccataaaaaatagacagaagcattctcagaaacttgttggtgatatgtgtcctcaactaacagagttgaactttgccattgatagagagcagttttgaaacactctttttgtggaatctgcaagtggatatttggatagcttggaggatttcgttggaagcgggaattcaaataaaaggtagacagcagcattctcagaaatttctttctgatgtctgcattcaactcatagagttgaagattccctttcatagagcaggtttgaaacactctttctggagtatctggatgtggacatttggagcgctttgatgcctacggtgaaaaagtaaatatcttcccataaaaacgacacagaggattctgagaaacaagtttgtgatgtgtgtactcagctaacagagtggaacctttctttttacagagcagctttgaaactctatttttgtggattctgcaaattggtatttagattgctttaacgatatcgttggaaaagggaatatcgtcatacaaaattctagacagaaagtattctcacaaacttctttgtgatgtgtgtcctcaactaacagagttgaacctttcttttgatgcagcagtttggaaacacccttttggtagaaactgtaagtggatatttggatagctctaacgatttcgttggaaacgggaatatcatcatctaaaatctagacagaagcactattagaaactacttggtgatatctgcattcaagtcacagagttgaacattcccttactttgagcacgtttgaaacactcttttggaagaatctggaagtggacatttggagcgctatgatgcctttggtgaaaaggaaacgtcttccaataaaagccagacagaagcattctcagaaacttgtttgtgatgtgtgtactcaactaaaagagttgaacctttctattgatagagcagttttgaaacactctttttgtggattctgcaagtggatatttggattgctttgaggatttcgttggaagcgggaattcgtataaaaactagacagcagcattcccagaaatttctttcggatatttccattcgactcatagagatgaacatggcctttcatagagcaggtttgaaacactctttttgtagtttgtggaagtggacatttcgatcgccttgacgcctacggtgaaaaaggaaatatcttcccataaaaaatagacagaagcattctcagaaacttgttggtgatatgtgtcctcaactaacagagttgaactttgccattgatagagagcagttttgaaacactctttttgtggaatctgcaagtggatatttggatagcttggaggatttcgttggaagcgggaattccaataaaaggtagacagcagcattctcagaaatttctttctgatgtctgcattcaactcatagagtttaagattccctttcatagagcaggtttgaaacactctttctggagtatctggatgtggacatttggagcgctttcatgcctatggtgaaaaagtaaatatcttgtcataaaaacgagacagaaggattctgagaaacaagtttgagatgtgtgtactcagctaacagagtggaacctttctttttacagagcagctttgaaactctatttttgtggattctgcaaatggatatttagattgctttaacgatatcgttggaaaagggaatatcgtcatacaaaatctggacagaagcattctcacaaacttctttgtgatgtgtgtcctcaactaacagagttgaacctttcttttgatgcagcaatttggaaacacccttttggtcgaaactgtaactggatatttggatagctctaacgatttcgttggaaacgggaatatcatcatctaaaatctagacagaagcactattagaaactacttggtgatatctgcattcaagtcacagagttgaacattcccttactttgagcacgtttgaaacactcttttggaagaatctggaagtggacatttggagcgccttgatgcctttggtgaaaaggaaacgtcttccaataaaagccagacagaagcattctcagaaacttgtttgtgatgtgtgtactcaactaaaagagttgaacctttctattgatagagcagttttgaaacactctttttgtggattctgcaagtggatatttggattgctttgaggatatcgttggaagcgggaatttgtataaaaactagacagcagcattcccagaaatttctttcggatatttccattcaactcatagagatgaacatggcctttcatagagcaggtttgaaacactctttttgtagtttgcggaagtggacatttcgatcgccttgacgcctacggtgaaaaaggaaatatcttcccataaaaaatagacagaagcattctcagaaacttgttggtgatatgtgtcctcaactaacagagttgaactttgccattgatagagagcagttttgaaacactctttttgtggaatctgcaagtggatatttggatagcttggaggatttcgttggaagcgggaattcaaataaaaggtagacagcagcattctcagaaatttctttctgatgtctgcattcaactcatagagttgaagattccctttcatagagcaggtttgaaacactctttctgtagtatctggatgtggacatttggagcgctttgatgcctacagtgaaaaagtataatcttcccataaaaacgagacagaaggattctcagaaacaagtttgtgatgtgtgtactcagctaacagagtggaacctttctttttacagagcagctttgaaactctatttttgtggattctgcaaattgatatttagattgctttaacgatatcgtggaaaagggaatatcgtcatacaaaatctagacagaagcattctcacaaacttctttgtgatgtgtgtcctcaactaacagagttgaacctttcttttgatgcagcaatttggaaacacccttttggtagaaactgtaactggatatttggatagctctaacgatttcgttggaaacgggaatatcatcatctaaaatgtagacaaaagcactattagaaactacttggtgatatctgcattcaagtcacagagttgaacattcccttactttgagcacgtttgatacactcttttggaagaatctggaagtggacatttggagcgctttgatgcctttggtgaaaaggaaacgtcttccaataaaagccagacagaagcattctcagaaacttgtttgtgatgtgtgtactcaactaaaagagttgaacctttctattgatagagcagttttgaaacactctttttgtggaatctgcaagtggatatttggatagcttggaggatttcgttggaagcgggaattcaaatgaaatgtagacagcagcattcccagtaaatttctttcggatatttccattcaactcattgagatgaacatcgcctttcatagagcaggtttgaaacactctttttgtagtttgtggaagtggacatttcgatcgccttgacgcctacagtgaaaaaggaaatatcttcccataaaaaatagacagaagcattctcagaaacttgttggtgatatgtgtcctcaactaacagagttgaactttgccattgatagagagcagttttgaaacactctttttgtggaatctgcaagtggatatttggatagcttggaggatttcgttggaagcgggaattcaaataaaaggtagacagcagcattctcagaaatttctttctgatgtctgcattcaactcatagagttgagcattccctttcatagggcaggtttgaaatactctttctgtagtatctggatgtggacatttggagcgctttgatgcctacggtgaaaaagtaaatatcttcccataaaaacgagacagaaggattctgagaaaaaagtttgtgatgtgtgtactcagctaacagagtggaacctctcttttgatgcagcagtttggaaacactctttttgtagaaactgtaagtggatatttggatagctctaatgatttcgttggaaacgggaatatcatcatctaaaatctagacagaagcgctctcagaaactactttgtgatatctgcattcaagtcacagagttgaacattcgctttcttacagcacttttgaaacactctttttgtagtatctggaagtggacatttggagctctttgatgcctttggtgaaaaaggaaatgtcttcccataaaaactagacagaagcattctcagaaacttgtttgtgatgtgtgtacccagctaaaggagttgaacatttctattgatagagcagttttgaaacgctctttttgtggaaaatgcaggtggatatttggatagcttggaggatttcgttggaagcgggaattcaaataaaaggtagacagcagcattctcagaaatttctttctcatgtctgcattcaactcatagagttgaagattccctttcatagagcaggtttgaaacactctttctggagtatctggatgtggacatttggagcgctttgatgcctacggtggaaaagtaaatatcttcccataaaaacgagacagaaggattctgagaaacaagtttgtgatgtgtgtactcagctaacagagtggaacctctcttttgatgcagcagtttggaaacactctttttgtagaaactgtaagtggatatttggatagctctaatgatttcgttggaaacgggaatatcatcatctaaaatctagagagaagccctctcagaaactactttgtgatatgtgcattcaagtcacagagttgaacattcgctttcttagagcacgtttgaaacactctttttgtagtgtctggaagtggacatttggagcgctttgatgcctttggtgaaaaagggaacgtcttcccataaaaactagacagaagcattcacagaaacttgtttgtgatgtgtgtacccagccaaaggagttgaacatttctattgatagagcagttttgaaacactctttttgtggaaaatgcaggtggatatttggatagcttggaggatttcgttggaagcgggaattcaaataaaaggtagacagcagcattctcagaaatttctttctgatgtctgcattcaactcatacagttgaagattccctttcgtagagcaggtttgaaacactccttctggagtatctggatgtggacatttggagcgctttgatgcctacggtggaaaagtaaatatcttcccataaaaacgagacagaaggattctcagaaacaagtttgtgatgtgtgtactcagctaacagagtggatcctttcttcttacagagcagctttgaaactctatttctgtggattctgcaaattgacatttgggttgatttaacgacatcgttggaaaagggaatatcttcatacaaaatctagacagaagcattctcacaaacttctttgtgatgtgtgtcctcaactaacagagttgaacctttcttttaatgcagcagtttggaaacactctttttgtagaaactgtaagtggatatttggatagctctaacgatttcgttggaaacgggaatatcatcatctaaaatctagacagaagcactattagaaactacttggtgatatctgcattcaagtcacagagttgaacattcccttacttcgaccacgtttgaaactctcttttggaagaatctggaagtggacatttggagcgctttgatgcctttggtgaaaaggaaacgtcttccaataaaagccagacagaagcattctcagaaacttgttggtgatgtgtgtactcaactaaaagagttgaacctttctattgatagagcagttttgaaacactctttttgtggattctgcaagtggatatttggattgctttgaggatttcgttggaagcgggaattcatataaaaacaagacagcagcattcccagaaatttctttcggatatttccattcaactcattgagatgaacatcgcctttcatagagcaggtttgaaacactctttttgtagtttgtggaagtggacatttcgatcgccttgacgcctacagtgaaaaaggaaatatcttcccataaaaaatagacagaagcattctcagaaacttgttggtgatatgtgtcctcaactaacagagttgaactttgccattgatagagagcagttttgaaacactctttttgtggaatctgcaagtggatatttggatagcttggaggatttcgttggaagcgggaattcaaataaaaggtagacagccagcattctcagaaatttctttctgatgtctgcattcaactcatagagttgaagattccctttcatagagcaggtttgaaacactctttctggagtatctggatgtggacatttggagcgctttgatgcctacggtgaaaaagtaaatatcttcccataaaaacgacacagaggattctcagaaacaagtttgtgatgtgtgtactcagctaacagagtggaacctctcttttgatgcagcagtttggaaacactctttttgtagaaactgtaagtggatatttggatagctctaatgatttcgttggaaacgggaatatcatcatctaaaatctagacagaagccctctcagaaactactttgtgatatctgcattcaagtcacagagttgaacatccggtttcttagagcacgtttgaaacactctttttgtagtgtctggaagtggacatttggagcgctttgatgcctttggtgaaaaagggaatgtcttcccataaaaactagacagaagcattctcagaaacttgtttgtgatgtgtgtacccagctaaaggagttgaacatttctattgatagagcagttttgaaacactctttttgtggaaaatgcaagtggatatttggatagcttggaggatttcgttggaagcgggaattcaaataaaagatagacagcagcattctcagaaatttctttctgatgtctgcattcaactcatagagttgaagattccctttcatagagcaggtttgaaacactgtttctggagtatctggatgtggacatttggagcgctttgatgcctacggtgaaaaagtaaatatcttcccatcaaaacgagacagaaggattctcagaaacaagtttgtgatgtgtgtactcagctaacagagtggaacctttctttttacagagcagctttgaaactctatttttgtggattctgcaaatggatatttagactgctttaatgatatcgctggaaaagggaatatggtcatacaaaatctagacagaagcattctcgcaaacttctttgtgatgtgtgtcctcaactaacagagttgaacctttcttttgatgcagcattttggaaacacccttttggtagaaactgtaactggatatttggatagctctaacgatttcgttggaaacgggaatatcatcatctaaaatgtagacagaagcactattagaaactacttggtgatatctgcattcaagtcacagagttgaacattcccttactttgagcacgtttgaaacactcttttggaagaatctggaagtggacatttggagcgctttgatgcctttggtgaaaaggaaacgtcttccaataaaagccagacagaagcattctcagaaacttgttcgtgatgtgtgtactcaactaaaagagttgaacctttctattgatagagcagttttgaaacactctttttgtggattctgcaagtggatatttggattgctttgaggatttcgttggaagcggaaattcgtataaacactagacagcagcattcccagaaatttctttcggatatttccattcaactcatagaggtgaacatggcctttcatagagcaggtttgaaacactctttttgtagtttgtggaagtggacatttcgatcgccttgatgcctacggtgaaaaaggaaatatcttcccataaaaaatagacagaagcattctcagaaacttgttggtgatatgtgttctcaactaacagagttgaactttgccattgatagagagcagttttgaaacactccttctgtggaatctgcaagtggatatttggatagcttggaggatttcgttggaagcgggaattcaaataaaaggtagacagcagcattctcagaaatttctttgtgatgtgtacattcaactcatagagtagaacattccctttcatagagcaggtttgaaacactctttctgtactatctggatgtggacatttggaacgctttgatgcctacggtgaaaaagtaaatatcttcccataaaaactagacagaaggattctgagaaacaagtttgtgatgtgtgtactcagctaacagagtggaacctttctttttacagagcagctttgaaactctatttttgtggattctgcaaatggatatttagattgctttaatgatatcgttggaaaagggaatatcgtcatacaaaatctagacagaagcattctcacaaacttctttgtgatgtgtgtcctcaactaacagagttgaacctttcttttgatgcagcagtttggaaacactctttttgtagaaactgtaagtggatatttggatagctctaatgatttcgttggaaacgggaatatcatcatctaaaatctagacagaagcactattagaaactacttggtgatatctgcattcaagtcacagagttgaacattcccttactttgagcacgtttgaaacactcttttggaagaatctggaagtggacatttggagcgctttgatgcctttggtgaaaaggaaacgtcttccaataaatgccagacagaaagcattctcagtaaacttgttcgtgatgtgtgtactcaactaaaagagttgaacctttctattgatagagcagttttgaaacactctttttgtggattctgcaagtggatatttggattgctttgaggatttcgttggaagcgggaattcgtataaacactagacagcagcattcccagaaatttctttcggatatttccattcaactcatagagatgaacatcgcctttcatagagcacgtttgaaacactctttttgtagtttgtggaagtggacatttcgatcgccttgacgcctacggtgaaaaaggaaatatcttcccataaaaaatagacagaagcattctcagaaacttgttggtgatatgtgtcctcaactaacagagttgaactttgccattgatagagagcagttttgaaacactctttttgtggaatctgcaagtggatatttggatagcttggaggatttcgttggaagcgggaattcaaataaaaggtagacagcaggattctgagaaacaagtttgtgatgtgtgtactcagctaacagagtggaacctctcttttgatgcagcagtttggaaacactctttttgtagaaactgtaagtggatatttggattgctctaatgatttcgttggaaacgggaatatcatcatctaaaatctagacagaagcactctcagaaactactttttgatatctgcattcaagtcatagagttgaacattcgctttcttagagcacttttgaaacactctttttgtagtatctggaagtggacatttggagctctttgatgcctttggtgaaaaaggaaatgtcttcccataaaatctagaaagaagctttctcagaaacttgtttgtgatgtgtgtacccagcgaaaggagttgaacatttctattgatagagcagttttgaaacactctttttgtggaatctgcaagtggatatttggatggctgggaggtttttgttggaagcgggaattcaaataaaaggtagacagcagcattctcagaaatttctttctgatgtctgcattcaactcatagagttgaagattccctttcatagagcaggtttgatacagtctttctggagtatctggatgtggacatttggagcgctttgatgcctacggtgaaaaagtaaatatcttcccataaaaacgagacagaaggattctcagaaacaagtttgtaatgtgtgtactcagctaacagagtggaacctttctttttacagagcagctttgaaactctatttttgtggattctgcaaattgatatttagattgctttaacgatatcgttggaaaagggaatatcgtcatacaaaatctagacagaagcattctcacaaacttctttgtgatgtgtgtcctcaactaacagagttgaacctttcttttgatgcagcaatttggaaacacccttttggtagaaactgtaactggatatttggatagctctagcgatttcgttggaaacgggaatatcatcatctaaaatgtagacagaaagcactattagaaactacttggtgatatctgcattcaagtcacagagttgaacattcccttacttcgagcacgtttgaaacactcttttggaagaatctggaagtggacatttggagcgctttgatgcctttggtgaaaaggaaacgtcttccaataaaagccagacagaagcattctcagaaacttgttcatgatgtgtgtactcaactaaaagagttgaacctttctattgatagcgcagttttgaaacactctttttgtggattctgcaagtggatatttggattgctttgaggatttcgttggaagcgggaattcatataaaaactagacagcagcattcccagaaatttctttcggatatttccattcaactcatagagatgaacatggcctttcatagagcaggtttgaaacactctttttgtagtttgtggaagtggacatttcgatcgccttgacgcctacgctgaaaaaggaaatatcttcccataaaaaatagacagaagcattctcagaaacttgttggtgatatgtgtcctcaactaacagagttgaactttgccattgatagagagcagttttgaaacactctttttgtggaatctgcaagtggatatttggatagcttggaggatttcgttggaagcgggaattcaaataaaggtagacagcagcattctcagaaatttctttctgatgtctgcattcaactcatagagttgaagattccctttcatagagcacgtttgaaaccctctttctggagtatctggatgtggacatttggagcgctttgatgcctacggtgagaaagtaaatatcttcccataaaaacgagacagaaggattctgagaaacaagtttgtgatgtgtgtactcagctaacagagtggaacctctcttttgatgcagcagtttggaaacactctttttgtagagactgtaagtggatatttggatagctctaatgatttcgttggaaacgggaatatcatcatctaaaatctagacagaagccctctcagaaaactactttgtgatatctgcattcaagtcacagagttgaacattcgctttcttagagcacgttggaaacactctttttgtagtgtctggaagtggacatttggagcgctttgatgcctttgttgaaaaagggaacgtcttcccataaaaactagacagataagcattctcagaaacttgtttgtgatgtgtgtacccagccaaaggagttgaacatttctattgatagagcagttttgaaacgctctttttgtggaaaatgcaggtggatatttggatagcttggaggatttcgttggaagcgggaattcaaataaaaggtagacagcagcattctcagaaatttctttctgatgtctgcattcaagtcatagagttgaagattccctttcatagagcaggtttgaaacagtctttctggagtatctggatgtggacatttggaacgctttgatgcctacggtggaaaagtaaatatcttcccataaaaacgagacagaaggattctcagaaacaagtttgtgatgtgtgtactcagctaacagagtggaacctttctttttacagagcagctttgaaactctatttttgtggattctgcaaattgatatttagattgctttaactatatcgttggaaaagggaatatggtcatacaaaatctagacagaagcattctcacaaacttctttgtgatgtgtgtcctcaactaacagagttgaacctttcttttgatgcagcagtttggaaacactctttttgtagaaactgtaagtggatatttggatagctctaacgatttcgctggaaacgggaatatcgtcatctaaaatctagacagaagccctctcagaaactactttgtgatatctgcattcaagtcacagagttgaacattcgctttcttagagcacgtttgaaacactctttttgtagtgtctggaagtggacatttggagcgctttgatgcctttgttgaaaaagggaatgtcttcccataaaaactagacagaagcattctcagaaacttgtttgtgatgtgtgtacccagccaaaggagttgaacatttctattgatagagcagttttgaaacactcttgttgtggaaaatgcaggtggatatttggatagcttggaggatttctttggaagcgggaattcaaataaaaggtagacagcagcattctcagaaatttctttctgatgtctgcattcaactcatagagttgaagattccctttcatagagcaggtttgaaacactccttctggagtatctggatgtggacatttggagcgctttgatgcctacggtgaaaaagtaaatatcttcccagaaaaacgagacagaaggattctcagaaacaagtttgtgatgtgtgtactcagctaaaagagtggaacctttctttttacagagcagctttgaaactctatttttgtggattctgcaaattgatatttagattgttttaacgatatcgttggaaaagggaatatcgtcatacaaaatctagacagaagcattctcacaaacttctttgtgatgtgtgtcctcaactaacagagttgaagctttcttttgatgcagcaatttggaaacacccttttggtagaaactgtaactggatatttggatagctctaacgatttcgttggaaacgggaatatcatcatctaaaatctagacagaagcactattagaaactacttggtgatatctgcattcaagtcacagagttgaacattcccttactttgagcacgtttgaaacactcttttggaagaatctggaagtggacatttggagcgctttgatgccttttgtgaaaaggaaacgtcttcaaataaaagccagacagaagcgttctcagaaacttgttcgtgatgtgtgtactcaactaaaagagttgaacctttctattgatagagcagttttgaaacactctttttgtggattctgcaagtggatattgggattgctttgaggatttcgttggaagcgggaattcgtataaaaactagacagcagcattcccagaaatttctttcggatatttccattcgactcatagagatgaacatggcctttcatagagcaggtttgaaacactctttttgtagtttgtggaagtggacatttcgatcgccttgacgcctacggtgaaaaaggaaatatcttcccataaaaaatagacagaagcattctcagaaacttgttggtgatatgtgtcctcaactaacagagttgaactttgccattgatagagagcagttttgaaacactctttttgtggaatctgcaagtggatatttggatagcttggaggatttcgttggaagcgggaattcaaatcaaaggtagacagcagcattctcagaaattactttctgatgtctgcattcaactcatagagttgaagattccctttcatagagcaggtttgaaacactctttctgtagtacctggatgtggacatttggagcgctttgatacctacggtgaaaaagtaaatatcttcccataaaaactagacagaaggattctgagaaacaagtttgtgatgtgtgtactcagctaacagagtggaacctctcttttgatgcagcagtttggaaacactctttttgtagaaactgtaagtggatatttggatagctctaatgatttcgttggaaacgggaatataatcatctaaaatctagacagaagcagtctcagaaactactttgtgatatctgcattccagtcacagagttgaaaactcccttacttagagcaggtttgaaacacactttttgtagaatctggaagtggacatttggagcgctttgatgcctttggtgaaaaaggaaatgtcttcccttaaaaagtagacagaatcattctcagaaacttgtttgtgatgtgtgtacccagctaaaggagttgaactttgccattgatagagagcagttttgaaaccctctttttgtggaaaatgcaagtgggtatttggatagcttggaggatttcgttggaagcgggaattcaaataaaaggtagacagcagcattctcagaaatttctttctgatgtgtgcattcaactcatagagttgaagattccctttcatagagcaggtttgaaacactctttctggagtatctggatgtggacatttggagcgctttgatgcctacggtggaaaagtaaatatcttcccataaaaacgagacagaaggattctgagaaacaagtttgtgatgtgtgtactcagctaacagagtggaacctctcttttgatgcagcagtttggaaacactctttttgtagaaactctaagtggatatttggatagctctaatgatttcgttggaaacgggaatatcatcatctaaaatctagacagaagcactctcagaaactactgtgtgatatctgcattcaagtcacagagttgaacattcgctttcttagagcacgtttgaaacactctttttgtagtgtctggaagtggacatttggagcgctttgatgtctttggtgaaaaagggaatgtcttcccataaaaactagacagaagcattctcagagacttgtttgtgatgtgtgtacccagccaaaggagttgaacatttctattgatagagcagttttgaaacactctttttgtggaaaatgcaggtggatatttggatagcttggaggatttcgttggaagcgggaattcaaataaaagttagacagcagcattctcagaaatttctttctgatgtctgcattcaagtcatagagttgaagattccctttcatagagcaggtttgaaacactcgttctggagtatctggatgtggacatttggagcgctttgatgcctacggtggaaaagtaaatatcttcccataaaaacgagacagaaggattctcagaaacaagtttgtgatgtgtgtactcagctaacagagtggaacctttatttttacagagcagctttgaaactctattttcgtggattctgcaaattgatatttagattgctttaacgatatcgttggaaaagggaatatcgtcatacaaaatactagacagaagcattctcacaaacttctttgtgatgtgtgtcctcaactaacagagttgaacctttcttttgatgcagcagtttggaaacactctttttgtagaaactgtaagtggatatttggatagctctaacgattttgttggaaacgggaatatcatcatctaaaatctagacagaagcactattagaaactacttggtgatatctgcattcaagtcacagagttgaacattcccttactttgagcacgtttgaaacactcttttggaagaatctggaagtggacatttggagcgctttgatgcctttgttgaaaaggaaacgtcttccaataaaagccagacagaagcattctgagaaacttgttcgtcatgtgtgtactcaactaaaagagttgaacctttctattgatagagcagttttgaaacactctttttgtggattctgcaagtggatatttggattgctttgaggatttcgttggaagcgggaattcgtataaacactagacagcagcattcccagaaatttctttcggatatttccattcacctcatagagatgaacatggcctttcagagagcaggtttgaaacactctttttgtagtttgtggaagtggacatttcgatcgccttgacgcctacggtgaaaaaggaaatatcttcccataaaatatagacagaagcattctcagaaacttgttggtgatatgtgtcctcaactaacagagttgaactttgccattgatagagagcagttttgaaacactctttttgtggaatctgcaagtggatatttggatagcttggaggatttcgttggaagcgggaattcaaataaaaggtagacagcagcattctcagaaatttctttgtgatgtctgcattcaactcatggagttgaagattccctttcatagagcaggtttgaaacactctttctggagtatctggatgtggacatttggagcgctttgatgcctacggtggaaaagtaaatatcttcccataaaaacgagacagaaggattctgagaaacaagtttgtgatgtgtgtactcagctaacagagtggaaccctttctttttacagagcagctttgaaactctatttttgtggattctgcaaattgatatttagattgctttaacgatatcgttggaaaacggaatatcgtcatacaaaatctagacagaagcattctcacaaacttctttgtgatgtgtgtcctcaactaacagagttgaacctttcttttgatgcagcagtttggaaacactctttttgtagaaactgtaagtggatatttggatagctctaacgatttcgttggaaacgggaatatcatcatctaaaacctagacagaagcactattagaaactacttggtgatatctgcattcaagtcacagagttgaacattcccttactttgagcacgtttgaaacactcttttggaagaatctggaagtggacatttggaacgctttgatgcctttggtgaaaaggaaacgtcttccaataaaagccagacagaagcattctcagaaaattgtttgtgatgtgtgtactcaactaaaagagttgaacctttctattgatagagcagttttgaaacactctttttgtggattctgcaagtggatatttggattgctttgaggatttcgttggaagcgggaattcgtataaaaactagacagcagcattcccagaaatttctttcggatatttccattcgactcatagagatgaacatggcctttcatagagcaggtttgaaacactctttttgtagtttgtggaagtggacatttcgatcgccttgacgcctacggtgaaaaaggaaatatcttcccataaaaaatagacagaagcattctcagaaacttgtttgtgatgtgtgtacccagctaaaggagttgaacatttctattgatagagcagttttgaaacactctttttgtggaaaatgcaagtggatatttggatagcttggaggatttcgttggaagcgggaattcaaataaaaggtagcagcattctcagaaatttctttctgatgtctgcattcaactcatagagttgaagattccctttcatagagcaggtttgaaacactctttctggagtatctggatgtggacatttggagcgctttgatgcctacggtgaaaaagtaaatatcttcccataaaaacgagacagaaggattctcagaaacaagtttgtgatgtgtgtactcagctaacagagtggaacctttctttttatagagcagctttgaaactctatttttgtggattctgcaaattgatatttagattgctttaacgatatcgttggaaaagggaatatcgtcatacaaaatctagacagaagcattctcacaaacttctttgttatgtgtgtcctcaactaacagtagttgaacctttcttttgatgcagcagtttggaaacactctttttgtagaaactgtaagtggatatttggatagctctaacgatttcgttggaaacgggaatatcatcatctaaaatctagacagaagcactgttagaaactacttggtgatatctgcattcaagtcaaagagttgaacattcccttactttgagcacgtttgaaacactcttttggaagaatctggaagtggacatttggagcgctttgatgcctttggtgaaaaggaaacgtcttccaataaaagccagacagaagcattctcagaaacttgtttgtgatgtgtgtactcaactaaaagagttgaacctttctattgatagagcagttttgaaacactctttttgtggattctgcaagtggatatttggattgctttcaggaattcgttggaagcgggaattcgtataaaaactagacagcagcattcccagaaatttctttcggatatttccattcgactcatagagatgaacatggcctttcatagagcaggtttgaaacactctttttgtagtttgtggaagtggacatttcgatcgccttgacgcctacggtgaaaaaggaaatatcttcccataaaaaatagacagaagcattctcagaaacttgttggtgatatgtgtcctcaactaacagagttgaactttgccattgatagagagcagttttgaaacactctttttgtggaatctgcaagtggatatttggatagcttggaggatttcgttggaagcgggaattcaaataaaagttagacagcagcattctcagaaatttctttctgatgtctgcattcaactcatagagttgaagattccctttcatagagcaggtttgaaacactctttctggagtatctggatgtggacatttggagcgctttgatgcctacggtgaaaaagtaaatatcttcccataaaatcgagacagaaggattctgagaaacaagtttgtgatgtgtgtactcagctaacagagtggaaacctcttttgatgcagcagtttggaaacactctttttgtagatactgtaagtggatatttgtatagctctaatgatttcgttggaaacgggaatatcatcatctaaaatctagacagaagccctctcagaaactactttgtgatatctgcattcaagtcacagagttgaacattcgctttcttagagcacgtttgaaacactctttttgtagtgtctggaagtggacatttggagtgctttgatgcctttggtgaaaaagggaacgtcttcccataaaaactagacagaagcattctcagaaacttgtttgtgatgtgtgtacccagctaaaggagttgaacatttctattgatagagcagttttgaaacactctttttgtggaaaatgcagggggatatttggatagcttggaggatttcgttggaagcgggaattcaaataaaaggtagacagcagcattctcagaaatttctttctgatgtctgcattcaactcatagagttgaagattccctttcatagagcaggtttgaaacactctttctggagtatctggatgtggacctttggagcgctttgatgcctacggtgaaaaagtaaatatcttccataaaaacgagacagaaggattctcagaaacaagtttgtgatgtgtgtactcagctaacagagtggaacctttctttttacagagcagctttgaaactctatttttgtggattctgcaaattgatatttagattgctttaacgatatcgttggaaaagagaatatggtcatacaaaatctagacagaagcattctcacaaacagctttgtgacgtgtgtcctcaactaacagtagttgaacctttcttttgatgcagcagtttggaaacacccttttggtagaaactgtaagtggatatttggatagctctaacgatttcgttggaaacgggaatatcatcatctaaaatctagacagaagcactattagaaactacttggtgatatctgcattcaagtcacagagttgaacattcccttacattgagcacgtttgcaacactcttttggaagaatctggaagtggacatttggagcgctttgatgcctttggtgaaaaggaaacgtcttccaataaaagccagacagaagcattctcagaaacttgtttgtgatgtgtgtactcaactaaaagagttgaaactttctattgatagagcagttttgaaacactctttttgtggattctgcaagtggatatttggattgctttgaggatttcgttggaagcgggaattcgtataacaactagacagcagcattcccagaaatttctttcggatatttccattcgactcatagagatgaacatggcctttcatagagcaggtttgaaacactctttttgtagtttgtggaagtggacatttcgatcgccttgacgcctacggtgaaaaaggaaatatcttcccataaaaaatagacagaagcattctcagaaacttgttggtgatatgtgtcctcaactaacagagttgaactttgccattgatagagagcagttttgaaacactctttttgtggaatctgcaagtggatatttggatagcttggaggatttcgttggaagcgggaattcaaataaaaggtagacagcagcattctcagaaatttctttctgatgtctgcattcaactcatagagttgaagattccctttcatagagcaggtttgaaacactctttctggagtatctggatgtggacatttggagcgctttgatgcccacggtgaaaaagtaaatatcttcccagaaaaacgagacagaaggattctgagaaacaagtttgtgatgtgtgtactcagctaacagagtggaacctttctttttacagagcagctttcaaactctttttttgtggattctgcaaattgatatttagattgctttaacgatatcgttggaaaagggaatatggtcatacaaaatctagacagaagctttctcagaaacttctttgtgatgtgtgtcctcaactcacagagttgaacctttcttttgatgcagcagtttggaaacactcttcttgtagaaactgttagtggatatttggataggtctaacgatatcgttggaaacggaaatatcttcatctaaagtatacacagaagcactattagaaactacttggtgatatctgcattcaagtcacagagttgaacattcccttacttcgaccacgtttgaaacactcttttggaagaatctggaagtggacatttggagcgctttgatgcctttggtgaaaacgaaacgtcttccaataaaagccagacagaagcattctcagaaacttgtttgtgatgagtgtactcaactaaaagagttgaacctttctattgatagagcagttttgaaacactctttttgtggattctgcaagtggatatttggattgctttgaggatttcgttggaagcgggaattcgtataaaaactagacagcagcattcccagaaatttctttcggatatttccattcaactcatagagatgaacatggcctttgcatagagcaggtttgaaacactctttttgtagtttgtggaagtggacatttcgatcgccttgacgcctacggtgaaaaaggaaatatcttcccataaaaaatagacagaagcattctcagaaacttgttggtgatatgtgtcctcaactaacagagttgaactttgccattgatagagagcagttttgaaacactctttttgtggaatctgcaagtggatatttggatagcttggaggatttcgttggaagcgggaattcaaataaaaggtagacagcagcattctcagaaatttctttctgatgtctgcattcaactcatagagttgaagattccctttcatagagcaggtttgaaacactctttctggagtatctggatgtggacatttggagcgctttgatgcctacggtgaaaaagtaaatatcttcccagaaaaacgacacagaaggattctgagaaacaagtttgtgatgtgtgtactcagctaacagagtggaacctctcttttgatgcagcagtttggaaatactctttttgtagaaactgtaagtggatatttggatagctcctaatgatttcgttggaaacgggaatatcatcatgctaaaatactagacagaaagccctctcagaaactactttgtgatatctgcattcaagtcacagagttgaacattcgctttcttagagcacgtttgaaacactctttttgtagtgtctggaagtggacatttggagcgctttgatgtctttggtgaaaaagggaatgtcttcccataaaaactagacagaaggattctcagaaacttgtttgtgatgtgtgtacccagctaaaggagttgaacatttctattgatagagcagttttgaaacactctttttgtggaatctgcaggtggatatttggatagcttggaggatttcgttggaagcgggaattcaaataaaaggtagacaggagcattctcagaaatttctttctgatgtctgcattcaactcatagagttgaagattccctttcatagagcaggtttgaaacactcgttctggagtatctggatgtggacatttggagcgctttgatgcctacggtggaaaagtatatatcttcccataaaaacgagacagaaggattctcagaaacaagtttgcgatgtgtgtactcagctaacagagtggaacctttctttttacagagcagctttgaaactctatttttgtggattctgcaaattgatatttagattgctttaacgatatcgttggaaaagggaatatcgtcatacaaaatctagacagaagcattctcacaaacttccttgtgatgtgtgtcctcaactaacagagttgaacctttcttttgatgcagcagtttggaaacactctttttgtagaaactgtaagtggatatttggatagctctaacgatttcgttggaaacgggaatatcatcatctaaaatctagacagaagcactattagaaactacttggtgatatctgcattcaagtcaaacagttgaacattcccttactttgagcacgtttgaaacactcttttggaagaatctggaagtggacatttggagcgctttgatgcctttggtgaaaaggaaacgtcttccaataaaagccagacagaagcattctcagaaacttgttcgtgatgtgtgtactcaactaaaagaagttgaacctttctattgatagagcagttttgaaacactctttttgtggattctgcaagtggatatttggattgctttgaggatttcgttggaagcgggaattcgtataaacactagacagcagcattcccagaaatttctttcggatatttccattcaactcatagagatgaacatggcctttcatagagcaggtttgaaacactctttttgcagtttgtggaagtggacatttcgatcgccttgacgcctacgctgaaaaaggaaatatcttcccataaaaaatagacagaagcattctcagaaacttgttggtgatatgtgtcctcaactaacagagttgaactttcccattgatagagagcagttttgaaacactctttttgtggactctgcaagtggatatttggatagcttggaggatttcgttggaagcgggaattcaaataaaaggtagacagcagcattctcagaaatttctttctgatgtctgcattcaactcatagagttgaagattccctttcatagagcaggtttgaaacactctttctggagtatctggatgtggacatttggagagctttgatgcctacggtgagaaagtaaatatcttcccataaaaacgtgacagaaggattctcagaaacaagtttgtgatgtgtgtactcagctaacagagtggaacctttctttttacagagcagctttgaaactctatttttgtggattctgcaaatggatatttagattgctttaacgatatcgctggaaaagggaatatggtcatacaaaatactagacagaagctttctcagaaacttctttgtgatgcgtgtcctcaactaacagagttgaacctttcttttgatgcagcagtttggaaacactctttttataaaaactgtaagtggatatttgggtaggtctaacgatatcgttggaaacggggatatcttcatctaaagtatacacagaaacactattagaaactacttggtgatatctgcattcaagtcacagagttgaacattcccttactttgagcacgtttgaaacactcttttggaagaatctggaagtggacatttggagcgctttgatgcctttggtgaaaaggaaacgtcttccaataaaagccagacagaaagcattctcagtaaacttgtttgtgatgtgtgtactcaactaaaagagttgaacctttctattgatagagcagttttgaaacactctttttgtggattctgcaagtggatatttggattgctttgaggatttcgttggaagcgggaattcatataaaaactagacagcagcattcccagaaatttctttcggatatttccattcaactcatagagatgaatatggcctttcatagagcaggtttgaaacactctttttgtagtttgtggaagtggacatttcgatcgccttgacgcctacggtgaaaaaggaaatatctacccataaaaaatagacagaagcattctcagaaacttgttggtgatatgtgtcctcaactaacagagttgaactttgccattgatagagagcagttttgaaacactctttttgtggaatctgcaagtggatatttggatagcttggaggatttcgttggaagcgggaattcaaataaaaggtagacagcagcattctcagaaatttctttctgatgtctgcattcaactcatagagttgaagattccctttcatagagcaggtttgaaacactctttctggagtatctggatgtggacatttggagcgctttgatgcctacggtgaaaaagtaaatatcttcccataaaaacgacacagaaggattctgagaaacaagtttgtgatgtgtgtactcagctaacagagtggaacctctcttttgatgcagcagtttggaaaccctctttttgtagaaactgtaagtggatatttggatagctctaatgatttcgttggaaacgggaatatcatcatctaaaatctagacagaagcactctcagaaactactttgtgatatctgcattcaagtcacagagttgaacattcgctttcttagagcacttttgaaacactctttttgtatatctggaagaggacatttggagctctttgatgcctttggtgaaaaaggaaatgtcttcccataaaaactagacagaagcattctcagaaagttgattgtgatgtgtgcacccagctaaaggagttgaacatttattgatagagcagttttgaagcactctttttgtggaaaatgcaagtggatatttggatagcttggaggatttcgttggaagcgggagttcaaataaaaggtagacagcagcattctcagaaattactttctgatgtctgcattcaactcatagagttgaagattccctttcatagagcaggtttgaaacactctttctgtagtatctggatgtggacatttggagcgctttgatacctacggtgaaaaaggaaatatcttcccataaaaactagacagaaggattctcagaaacaagtttgtgatgtgtgtactcagctaacagattggaacctttctttttacagagcagctttgaaactctatttttgtggattctgcaaattgatatttagattgctttaacgatatcgttggaaaagggaatatggtcatacaaaatctagacagaagcattctcacaaacttctttgtgatgtgtgtcctcaactaacagagttgaacctttcttttgatgcagcagtttggaaacactctttttgtagaaactgtaagtggatatttggatacttctaacgatttcgttggaaacgggaatatcatcatctaaaatctagacagaagcactattagaaactacttggtgatatctgtattcaagtcacagagttgaacattcccttactttgagcacgtttgaaacactcttttggaagaatctggaagtggacatttggagcgctttgatgcctttggtgaaaaggaaacgtcttccaataaaagccagacagaagcattctcagaaacttgtttgtgatgtgtgtactcaactaaaagagttgaacctttctattgatagagcagttttgaaacactctttttgtggattctgcaagtggatatttggattgctttgaggatttcattggaagcgggaattcgtataaaaactagacagcagcattcccagaaatttctttcggatatttccattcaactcattgagatgaacatcgcctttcatagagcaggtttgaaacactctttttgtagtttgtggaagtggacatttcgatcgccgtgacgcctacagtgaaaaaggaaatatcttcccataaacaatagacagaagcattctcagaaacttgttggtgatatgtgtcctcaactaacagagttgaactttgccattgatagagagcagttttgaaacactctttttgtggaatctgcaagtggatatttggatagcttggaggatttcgttggaagcgggaattcaaataaaaggtagacagcagcattctcagaaatttctttctgatgtctgcattcaactcatagagttgaagattccctttcatagagcaggtttgaaacactgtttctggagtatctggatgtggacatttggagcgctttgatgcctacggtgagaaagtaaatatcttcccataaaaacgagacagaaggattctgagaaacaagtttgtgatgtgtgtactcagctaacagagtggaacctctcttttgatgcagcagtttggaaacactctttttgtagaaactgtaagtggatatttggatagctctaatgatttcgttggaaacgcgaatatcatcatctaaaatctagacagaagcactctcagaaactactttttgatatctgcactcaagtcacagagttgaacattcgctttcttagagcacttttgaaacactctttttgtagtatctggaagtggacatttggagctctttgatgcctttggtgagaaaggaaatgtcttcccataaaaactagacagaagcattctcagaaagttgtttgtgatgtgtgtacccagctaaaggagttgaacatttctattgatagagtagttttgaaacactctttttgtggaaaatgcaagtggatatttggatagcttggaggatttcgttggaagcgggaattcaaataaaaggtagacagcagcagcattctcagaaatttctttctgatgtctgcattcaactcatagggttgaagattccctttcatagagcaggtttgaaacactctttctggagtatctggatgtggacatttggagcgctttgatgcctacggtgaaaaagtaaatatcttcccataaaaacgagacagaaggattctcagaaacaagtttgtgatgtgtgtactcagctaacagagtggaacttttatttttacagagcagctttgaaactctatttttgtggattctgcaaattgatatttagattgctttaacgatatcgttggaaaagggaatatcgtcatacaaaatctagacagaagcattctcacaaacttctttgtgatgtgtgtcctcaactaacagagttgaacctttcttttgatgcagcaatttggaaacacccttttggtagaaactgtaactggatatttgcttagctctaacgatttcgttggaaacgggaatatcatcatctgaaatctagacggaagcactattagaaactacttggtgatatctgcattcaagtcacagagttgaacattaccttactttgagcacgtttgaaacactcttttggaagaatctggaagtggacatttggagcgctttgatgcctttggtgaaaaggaaacgtcttccaataaaagccagacagaagcattctcagaaacttgttcgtgatgtgtgtactcaactaaaagagttgaacctttctattgatagagcagttttgaaacactctttttgtggattctgcaagtggatatttggattgctttgaggatttcgttggaagcgggaattcgtataaacactagacagcagcattcccagaaatttctttcggatatttccattcaactcatagagatgaacatggcctttcatagagcaggtttgaaacactctttttgtagtttgtggaagtggacatttcgatagccttgacgcctacggtgaaaaaggaaatatcttcccataaacaatagacagaagcattctcagaaacttgttggtgatatgtgtcctcaactaacagagttgaactttgccattgatagagagcagttttgaaacactctttttgtggaatctgcaagtggatatttggatagcttggaggatttcgttggaagcgggaattcaaataaaaggtagacagcagcattctcagaaatttctttctgatgtctgcattcaactcatagagttgaagattccctttcatagagcaggtttgaaacactctttctgtagtatctggatgtggacatttggagcgctttgatacatacggtgaaaaaggaaatatcttcccgtaaaaactagacagaaggattctcagaaacaagtttgtgatgtgtgtactcagctaatagagtggatcctttctttttacagagcagctttgaaactctatttctgtggattctgcaaattgatatttgggttgatttaacgacatcgttggaaaagggaatatcttcatacaaaatctagacagaagcattctcacaaacttctttgtgatgtgtgtcctcaactaacagagttgaacctttcttttgatgcagcagtttggaaacacccttttggtagaaactgtaagtggatatttggatagctctaacgatttcgttggaaacgggaatatcatcatctaaaatgctagacagaagcactattagaaactacttggtgatatctgcattcaagtcacagagttgaacattcccttactttgagcacgtttgaaacactcttttggaagaatctggaagtggacatttggagcgctttgatgcctttggtgaaaaggaaacgtcttccaataaaagccagacagaagcattctcagaaacttgtttgagatgtgtgtactcaactaaaagagttgaacctttctattgatagagcagttttgaaacactctttttgtggattctgcaagtggatatttggattgctttgaggatttcgttggaagcgggaattcgtataacaactagacagcagcattcccagaaatttctttcggatatttccattcaactcatagagatgaacatggcctttcatagagcaggtttgaaacactctttttgtagtttgtggaagtggacatttcgatcgccttgacgcctacggtgaaaaaggaaatatcttcccataaaaaatagacagaagcattctcagaaacttgttggtgatatgtgtcctcaactaacagagttgaactttgccattgatagagagcagttttgaaacactctttttgtggaatctgcaagtggatatttggatagtttggaggatttcgttggaagcgggaattcaaataaaaggtagacagcagcattctcagaaatttctttctgatctctgcattcaactcatagagttgaacattccctttcatagggcaggtttgaaatactctttctgtagtatctggatgtggacatttggagcgctttgatgcctacggtgaaaaagtaaatatcttcccataaaaacgagacagaaggattctgagaaacaagtttgtgatgtgtgtactcagctaacagagtggaacctctgttttgatgcagcagtttggaaacactctttttgtagaaactgtaagtggatatttggatagctctaatgatttcgttggaaacgggaatatcatcatctaaaatctagacagaagccctctcagaaactactttgtgatatctgcattcaagtcacagagttgaacattcgctttcttagagcacgttggaaacactctttttgtagtgtctggaagtggacacttggagcgctttgatgcctttggtgaaaaagggaacgtcttcccataaaaactagacagaagcattctcagaaacttgtttgtgatgtgtgtacacagccaaaggagttgaacatttctattgatagagcagttttgaaacactcttgttgtggaaaatgcaggtggatatttggatagcttggaggatttcgttggaagcgggaattcaaataaaaggtagacagcaggattctgagagacaagtttgtgatgtgtgtactcagctaacagagtggaacctttctttttacagagcagctttgaaactctatttttgtggattctgcaaatggatatttagattgctttaacgatatcgttggaaaagggaatatggtcatacaaaatctggacagaagaattctcacaaacttctttgtgatgtgtgtcctcaactaacagagttgaacctttcttttgatgcagcagtttggaaacacccttttggtagaaactgtaagtggatatttggatagctctaacgatttcgttggaaacgggaatatcatcatctaaaatctagacagaagcactattagaaacttcttggtgatatctgcattcaagtcacagagttgaacattcccttacttcgagcacgtttgaaacactcttttggaagaatctggaagtggacatttggagcgctttgatgcctttggtgaaaaggaaacgtcttccaataaaagccagacagaagcattaccagaaatttctttcggatatttccattcaactcatagagaagaacatggcctttcatagagcaggtttgaaacactctttttgtagtttgtggaagtggacatttcgatcgccttgacgcctacggtgaaaaaggaaatatcttcccataaaaaatagacagaagcattctcagaaacttgttggtgatatgtgtcctcaactaacagagttgaactttgccattgatagagagcagttttgaaacactctttttgtggaatctgcaagtggatatttggatagcttggaggatttcgttggaagcgggaattcaaataaaaggtagacagcagcattctcagaaatttctttctgatgtctgcattcaactcatagagttgaagattccctttcatagagcaggtttgaaacactctttctggagtatctggatgtggacatttggagcgctttgatgcctacggtgaaaagtaaatatcttcccataaaaacgagacagagtattctcagaaacaagtttgtgatgtgtgtactcagctaacagagtggatcctttctttttacagagcagctttgaaactctatttctgtggattctgcaaattgatatttgggttgatttaacgatatcgttggaaaagggaatatcttcatacaaaatctagacagaagcattctcacaaacttctttgtgacgtgtgtcctcaactaacagagttgaacctttcttttgatgcagcagtttggaaacactgtttttgtagcaactgtaagtggatatttggatagatctaacgatttcgttggaaacgggaatatcatcatctaaaatctagacagaagcactattagaaactacttggtgatatctgcattcaagtcacagagtagaacattcccttacttcgaccacgtttgaaacactcttttggaagaatctggaagtggacatttggagcactttgatgcctttggtgaaaaggaaacgtcttccaataaaagccagacagaagcattctcagaaacttgtttgtgatgtgtgtactcaactaaaagagttgaacctttctattgatagagcggttttgaaacactctttttgtggattctgcaagtggatatttggattgctttgaggatttcgttggaagcgggaattcatataaaaactagacagcagcattcccagaaatttctttcggatatttccattcaactcattgagatgaacatcgcctttcatagagcaggtttgaaacactctttttgtagtttgtggaagtggacatttcgatctccttgacgcctacagtgaaaaaggaaatatcttcccataaaaaatagacagaagcattctcagaaacttgtttgtgatgtgtgcacccagctaaaggagttgaacatttctattgatagagcagttttgaagcactctttttgtggaaaatgcaagtggatatttcgatagcttggaggatttcgttggaagcgggagttcaaataaaaggtagacagcagcattctcagaaatttctttctgatgtctgcattcaactcatagagttgaagattccctttcatagagcaggtttgaaacactctttctggagtatctggatgtggacatttggagcgctttgatgcctacggtgaaaaagtaaatatcttcccagaaaaacgagacagaaaggattctcagaaacaagtttgtgatgtgtgtactcagctaacagagtggaacctttcttttgacagagcagctttgaaactctatttttgtggattctgcaaatggatatttagattgctttaacgatatcgttggaaaagggaatatcgtcatacaaaatctggacagaagctttctcagaaacttctctgtgatgtgtgtcctcaactcacagagttgaacctttctttagatgcagcagtttggaaacactttttttgtagaaactgtaagtggatatttgggtaggtctaacgatatcattggaaacgggaataccttcatctaaagtatacacagaagcactattagaaactacttggtgatatctgcattcaagtcacagagttgaacattcccttactttgagcacgtttgaaacactcttttggaagaatctggaagtggacatttggagcgctttgatgtctttggtgaaaaggaaacgtcttccaataaaagccagacagaagcattctcagaaacttgtttgtgatgtgtgtactcaactaaaagagttgaacctttctattgatagagcagttttgaaacactctttttgtggattctgcaagtggatatttggattgctttgaggatttcgttggaagcgggaattcggtataaaaactagacagcagcattcccagaaatttctttcggatatttccattcgactcatagagatgaacatggcctttcatagagcaggtttgaaacactctttttgtagtttgtggaagtggacatttcgatcgccttgacacctacggtgaaaaaggaaatatcttcccataaaaaatagacagaagcattctcagaaacttgttggtgatatgtgtcctcaactaacagagttgaactttgccattgatagagagcagttttgaaacactctttttgtggaatctgcaagtggatatttggatagcttggaggatttcgttggaagcgggaattcaaataaaaggtagacagcagcattctcagaaatttctttctgatgtctgcattcaactcatagagttgaacattccctttcatagagcaggtttgaaacactctttctggagtatctggatgtggacatttggagcactttgatgcctacggtgaaaaagtaaatatcttcccataaaaacgagacagaaggattctcagaaacaagtttgtgatgtgtgtactcagctaacagagtggaacctttctttttacagagcagctttgaaactctattgttgtggattctgcaaattgatatttagattgctttaacgatatcattggaaaagggaatatcgtcatacaaaatctagacagaagcattctcacaaacttctttgtgatgtgtgtcctcaactaacagagttgaacttttcttttgatgcagcagtttggaaacactgtttttgtagaaactgtaagtggatatttggatagctctaacgatttcattggaaacgggaatatcatcatctaaaatctagacagaaacactattagaaactacttggtgatatctgcattcaagtcacagagttgaacattcccttactttgagcacgtttcaaacactcttttggaagaatctggaagtggacatttggagcgctttgatgcctttggtgaaaaggaaacgtcttccaataaaagccagacagaagcattctcagaaacttgtttgtgatgtgtgtactcaactaaaagaggtgaacctttctattgatagagcagttttgaaacactctttttgtggattctgcaagtggatatttggattgctttgaggatttcgttggaagcgggaattcatataaaaactagacagcagcattcccagaaatttctttcggatatttccattcaactcatagaggtgaacatggcctttcatagagcaggtttgaaacactctttttgtagtttgtggaagtggacatttcgatcgccttgacgcctacgctgaaaaaggaaatatcttcccataaaaaatagacagaagcattctcagaaacttgttggtgatatgtgtcctcaactaacagagttgaactttgccattgatagagagcagttttgaaacactctttttgtggaatctgcaagtggatatttggatagcttggaggatttcgttggaagcgggaattcaaataaaaggtagacagcaggattctgagaaacaagtttgtgatgtgtgtactcagctaacagagtggaacctttctttttacagagcagctttgaaactctatttttgtggattctgcaaatggatatttagattgctttaatgatatcgttggaaaagggaatatcgtcatacaaaatctggacagaagcattctcacaaacttctttgtgatgtgtgtcctcaactaacagagttgaacctttcttttgatgcagcagtttgcaaacacccttttggtagaaactgtaactgtatatttggatagctctaacgatttcgttggaaacgggaatatcatcatctaaaatctagacagaagcactattagaaactacttggtgatatctgcattcaagtcacagagttgaacattcccttactttgagtacgtttcaaacactcttttggaagaatctggaagtggacatttggagcgctttgatgcctttggtgaaaaggaaacgtcttccaataaaagccagacagaagcattctcagaaacttttttgtgatgtgtgtactcaactaaaagagttgaacctttctattgatagagcagttttgaaacactctttttgtggattctgcaagtggatatttggattgctttgaggatttcgttggaagcgggaattcatataaacactagacagcagcattcccagaaatttctttcggatatttccattcgactcatagagatgaacatggcctttcatagagcaggtttgaaacactctttttgtagtttgtggaagtggacatttcgatcgccttgacgcctacggtgaaaaaggaaatatcttcccataaaaaatagacagaagcattctcagaaacttgttggtgatatgtgtcctcaactaacagagttgaactttgccattgatagagagcagttttgaaacactctttttgtggaatctgcaagtggatatttggatagcttggaggatttcgttggaagcgggaattcaaataaaaggtagacagcagcattctcagaaatttctttctgatgtctgcattcaacctcatagagttgaagattccctttcatagagcaggtttgaaacactctttctggagtatctggatgtggacatttggagcgctttgatgcctacggtgaaaaagtaaatatcttcccataaaaacgacacagaaggattctcagaaacaagtttgtgatgtgtgtactcagctaacagagtggaacctctcttttgatgcagcagtttggaaacactctttttgtagaaactgtaagtggatatttggatagctctaatgatttcgttggaaacgggaatatcatcatctaaaatctagacagaagcactctcagaaactactttttgatatctgcattcaagtcacagagttgaacatgcgctttctgagagcacttttgaaacactctttttgtagtatctggaagtggacatttggagctctttgatgcctttggtgaaaaaggaaatgtcttcccataaaaactagacagaagcattctcagaaacttgtttgtgatgtgtgtacccagccaaaggagttgaacatttctattgatagagcagttttgaaacactcttgttgtggaaaatgcaggtggatatttggatagcttggaggatttcgttgcaagcgggaattcaaataaaaggtagacagccagcattctcagaaatttctttctgatgtctgcattcaactcatagagttgaagattccctttcatagagcaggtttgaaacactcgttctggagtatctggatgtggacatttggagcgctttgatgcctacggtggaaaagtaaatatcttcccataaaaacgagacagaggattctcagaaacaagtttgtgatgtgtgtactcagctaacagagtggaacctttctttttacagagcagctttgaaactctatttttgtggattctgcaaattgatatttagattgctttaacgatatcattggaaaagggaatatcgtcatacaaaatctggacagaagcattctcacaaacttctttgtgatgtgtgtcctcaactaacagagttgaacctttcttttgatgcagcaatttggaaacacccttttggtagaaactgtaactggatatttggatagctctaacgatttcgttggaaacgggaatataatcatctaaaatgtagacagaagcactattagaaactacttggtgatatctgcattcaagtcacagagttgaacattcccttactttgagcacgtttgaaacactcttttggaagaatctggaagtggacatttggagcgctttgatgcctttggtgaaaaggaaacgtcttccaataaaagccagagagaagcattctcagaaacttgttcgtgatgtgtgtactcaactaaaagggttgaacctttctattgatagagcagttttgaaacactctttttgtggattctgcaagtggatatttggattgctttgaggatttcgttggaagcgggaattcgtataaacactagacagcagcattcccagaaatttctttcggatatttccattcaactcatagagatgaacatggcctttcatagagcaggtttgaaacactctttttgtagtttgtggaagtggacatttcgatcgccttgacgcctacgctgaaaaaggaaatatcttcccataaaaaatagacagaagcattctcagaaacttgttggtgatatgtgtcctcaactaacagagttgaactttgccattgatagagagcagttttgaaacactctttttgtggaatctgcaagtggatatttggatagcttggaggatttcgttggaagcgggaattcaaataaaaggtagacagcaggattctgagaaacaagtttgtgatgtttgtactcagctaacagattggaacctctcctttgatgcagcagtttggaaacactctttttgtagaaactgtaagtggatatttggatagctctaatgatttcgttggaaacgggaatatcatcatctaaaatctagacagaagcactctcagaaactactttgtgatatctgcattcaagtcacagagttgaacattcgctttcttagagcgcgtttgaaacactctttttgtagtgtctggaagtggacatttggagcgctttgatgcctttggtgaaaaagggaatgtcttcccataaaaactagacagaagcattctcagaaacttgtttgtgatgtgtgtacccagccaaagcagttgaacatttctattgatagagcagttttgaaacactcttgttgtggaaaatgcaggtggatatttggatagcttggaggatttcgttggaagcgggaattcaaataaaaggtagacagcagcattctcagaaatttctttctgatgtctgcattcaactcatagagttgaggattccctttcatagaggaggtttgaaacactcgttctggagtatctggatgtggacatttggagcgctttgatgcctacggtggaaaagtaaatatcttcccataaaaacgagacagaaggattctcagaaacaagtttgtgatgtgtgtactcagctaacagagtggaacctttgtttttacagagcagctttgaaactctagttttgtggattctgcaaattgatatttagattgctttaacgatatcgttggaaaagggaatatcgtcatacaaaatctagacagaagcattctcacaaacttctttgtgatgtgtgtcctcaactaacagagttgaacctttcttttgatgcagcagtttggaaacactctttttgtagaaactgtaagtggatatttggatagctctaaagatttcgttggaaacgggaatatcatcatctaaaatctagacagaagcactattagaaactacttggtgatatctgcattcaagtcacagagttgaacattcccttactttgagcacgtttgaaacactcttttggaagaatctggaagtggacatttggagcgctttgatgcctttggtgaaaaggaaacgtcttccaataaaagccagacagaagcattctcagaaacttgtttgtgatgtgtgtactcaactaaaagagttgaacctttctattgatagagcagttttgaaacactctttttgtggattctgcaagtggatatttggattgctttgaggattttgttgtaagcgggaattcgtataaaaactagacagcagcattcccagaaatttctttcggatatttccattcaactcatagagatgaacatggcctttcatagagcaggtttgaaacactctttttgtagtttgtggaagtggacatttcgatcgccttgacgcctacggtgaaaaaggaaatatcttcccataaaaaatagacagaaacattctcagaaacttgttggtgatatgtgtcctcaactaacagagttgaactttgccattgatagagagcagttttgaaacactctttttgtggaatctgcaagtggatatttggatagcttggaggatttcgttggaagcgggaattcaaataaaaagtagacagcagcattctcagaaatttttttctgatgtctgcattcaactcatagagttgaagattccctttcatagagcaggtttgaaacactctttctggagtatctggatgtggacatttggagcgctttgatgcctacggtgaaaaagtaaatatcttcccataaaaacgagacagaaggattctgagaaacaagtttgtgatgtgtatactcagctaacagagtggaacctctcttttgatgcagcagtttggaaacactctttttgtagaaactgtaagtggatatttggaagctctaatgattttgttggaaacgggaatatcatcatctaaaatctagacagaagcactctcagaaactactttgtgatatctgcattcaagtcacagagttgaatattcgctttcttagagcacgttggaaacactctttttgtagtgtctggaagtggacatttggagcgctttgatgcctttggtgaaaaagggaatgtcttcccataaaaactagacacaagcattctcagaaacttgtttgtgatgtgtgtacccaactaaaggagttgaacatttctattgatagagcagttttgaaacactctttttgtggaaaatgcaagtggatatttggatagcttggaggatttcgttggaagcgggaattcaaataaaaggtagacagcaggattctgagaaacaagtttgcgatgtgtgtactcagctaacagagtggaacctttctttttacagagcagctttgaaactctatttttgtggattctgcaaatggatatttagattgctttaacgatatcgttggaaaagggaatatcgtcatacaaaatctagacagaagcattctcacaaacttctttgtgatgtgtgtcctcaactaacagagttgaacctttcttttgatgcagcagtttggaaacactgtttttgtagcaactgtaagtggatatttggatagctctaacgatttcgttggaaacgggaatatcatcatctaaaatctagacagaagcactattagaaactacttggtgatatctgcattcaagtcacagagttgaacattcccttactatgagcacgtttgaaacactcttttggtagaatctggaagtggacatttggagcgctttgatgcctttggtgaaaaggaaacgtcttccaataaaagccagacagaagcattaacagaaacttgtttgtgatgtgtgtactcaactaaaagagttgaacctttctattgatagagcagttttgaaacactctttttgtggattctgcaagtggatatttggattgctttgaggatttcgttggaagcaggaattcgtataaaaactagacagcagcattcccagaaatttctttcggatatttccattcgactcatagagatgaacatggcctttcatagagcaggtttgaaacactctttttgtagtttgtggaagtggacatttcgatcgccttgacgcctacggtgaaaaaggaaatatcttcccataaaaaatagacagaagcattctcagaaacttgttggtgatatgtgtcctcaactaacagagttgaactttgccattgatagagagcagttttgaaacactctttttgtggaatctgcaagtggatatttggatagcttggaggatttcgttggaagcgggaattcaaataaaaggtagacagcagcattctcagaaatttctttctgatgtctgcattcaactcatagtgttgaagattccctttcatagagcaggtttgaaacactctttctggagtatctggatgtggacatttggagcggtttgatgcctacggtgaaaaagtaaatatcttcccataaaaacgagacagaaggattctgagaaacaagtttgtgatgtgtgtactcagctaacagagtggaacctctcttttgatgcagcagtttggaaacactctttttgtagaaactgtaagtggatatttggatagctctaatgatttcggttggaaacgggaatatcatcatctaaaatctagacagaagccctctcagaaactactttgtgatatctgcattcaagtcacagagttgaacattcgctttcttagagcacgtttgaaacactctttttgtagtgtctggaagtggacatttggagcgctttgatgcctttggtgaaaaagggaatgtctacccataaaaactagacagaagcattctcacaaacttgtttgtgatgtgtgtacccagccaaaggagttgaacatttctattgatagagcagttttgaaacactcttgttgtggaaaatgcaggtggatatttggatagcttggaggatttcgttggaagcgggaattcaaataaaaggtagacagcagcattctcagaaatttctttctgatgtctgcattcaactcatagagttgaagattccctttcatagagcaggtttgaaacactgtttctggagtatctggatgtggacatttggagggctttgatgcctacggtgaaaaagtaaatatcttcccataaaaacgagacagaaggattctcagaaacaagtttgtgatgtgtgtactcagctaacagagtggaacctttctttttacagagcagctttgaaactctatttttgtggattctgcaaattgatattgagattgctttaacgatatcgttggaaaagggaatatcgtcatacaaaatctagacagaagcattctcacaaacttctttgtgatgtgtgtcctcaactaacagagttgaacctttcttttaatgcagcagtttggaaacacccttttggtagaaactgtaagtggatattttgatagctctaacgatttcgttggaaacgggaatatcatcatctaaaatctagacagaagcactattagaaactacttggtgatatctgcattcaagtcacagagttgaacattcccttactttgagcacgtttgaaacactcttttggaagaatctggaagtggacatttggagcgctttgatgcctttggtgaaaaggaaacgtcttccaataaaagccagacagaagcattctcagaaacttgttcgtgatgtgtgtactcaactaaaagagttgaacctttctattgatagagcagttttgaaacactctttttgtggattctgcaagtggatatttggattgctttgaggatttcgttggaagcgggaatttggtataaacactagacagcagcattcccagaaatttctttcggatatttccattcaactcatagagatgaacatggcctttcatagagcaggtttgaaacactctttttgtagtttgtggaagtggacatttcgatcgccttgacgcctacggtgaaaaaggaaatatcttcccataaaaaatagacagaagcattctcagaaacttgttggtgatatgtgtcctcaactaacagagttgaactttgccattgatagagagcagttttgaaacactctttttgtggaatctgcaagtggatatttggatagcttggaggatttcgttggaagcgggaattcaaataaaaggtagacagcagcattctcagaaatttctttgtgatgtttgcattcaactcatagagttgaacattccctttcatagagcaggtttgaaacattctttctgtactatctggatgtggacatttgtaacgctttgatgcctacggtgaaaaagtaaatatcttcccataaaaactagacagaaggattctcagaaacaagtttgtgatgtgtgtactcagctaacagagtggaacctctcttttgacgcagcagtttggaaacactctttttgtagaaactgtaagtggatatttggaaagctctaatgatttcgttggaaacgggaatatcatcatctaaaatctagacagaagcactctcagaaactactttgtgatatctgcattcaagtcacagagttgaacattcgctttcttagagcacttttgaaacactctttttgtagtatctggaagtggacatttggagctctttgatgcctttggtgaaaaaggaaatgtctttccataaaaactagacagaagcattctcagaaacttgtttgtgatgtgtgaacccagcgaaaggagttgaacatttctattgatagagcagttttgaaacactctttttgtggaatctgcaagtggatatttggatagcttggaggttttcgttggaagcgggaattcaaataaaaggtagacagccagcattctcagaaatttctttctgatgtctgcattcaactcatagagttgaagattccctttcatagagcaggtttgaaacactctttctggagtatctggatgtggacatttggagcgctttgatgcctacggtgaaaaagtaaatatcttcccataaaaacgagacagaaggattctcagaaacaaatttgtgatgtgtgtactcagctaacagagtggaacctttctttttacagagcagctttgaaactctattgttgtggattctgcaaattgatatttagattgctttaacgatatcgttggaaaagggaataccgtcatacaaaatctagacagaagcattctcacaaacttctttgtgatgtgtgtcctcaactaacagagttgaacctttcttttgatgcagcagtttggaaacactctttttgtagaaactgtaactggatatttggatagatctaacgatttcgttggaaacgggaatatcatcatctaaaatctagacagaaacactattagaaactacttggtgatatctgcattcaagtcacagagttgaacattcccttacttcgaccacgtttgaaacactcttttggaagaatctggaagtggacatttggagcgctttgatgcctttggtgaaaaggaaacgtcttccaataaaagccagacagaagcattctcagaaacttgtttgtgatgtgtgtactcaactaaaagagttgaacctttctattgatagagcagttttgaaacactctttttgtggattctgcaagtggatatttggattgctttgaggatttcgttggaagcgggaattcatataaaaactagacagcagcattcccagaaatttctttcggatatttccattcaactcatagagatgaacatggcctttcatagagcaggtttgaaacactctttttgtagtttgtggaagtggacatttcgatcgccttgacgcctacggtgaaaaaggaaatatcttcccataaaaaatagacagaagcactctcagaaacttgttggtgatatgtgtcctcaactaacagagttgaactttgccattgatagagagcagttttgaaacactctttttgtggaatctgcaagtggatatttggatagcttggaggatttcgttggaagcggtaattcaaataaaaggtagacagcagcattctcagaaatttctttctgatgtctgcattcaactcatagagttgagcattccctttcatagggcaggtttgaaatactctttctgtagtatctggatgtggacatttggagcgctttgaggcctacgaagaaaaagtaaatatcttcccataaaaacgagacagaaggattctcagaaacaagtttgtgatgtgtgtactcagctaacagagtggaacctctcttctgatgcagcagtttggaaacactctttttgtagaaactgtaagtggatatttggatagctctaatgatttcgttggaaatgggaatatcatcaactaaaatctagacagaagcactctcagaaactactttgtgatatctgcattcaggtcacagagttgaacattcgctttcttagagcacgtttgaaacactctttttgtagtgtctggaagtggacatttggagcgctttgatgcctttggtgaaaaagggaatgtcttcccataaaaactagacagaagcattctcagaaacttgtttgtgatgtgtgtacccagccaaaggagttgaacatttctattgatagagcagttttgaaacactcttgttgtggaaaatgcaggtggatatttggatagcttggaggatttcgttggaagcaggaattcaaataaaaggtagacagcagcattctcagaaatttctttctgatgtctgcattcaactcatagagttgaagattccctttcatagagcaggtttgaaacactctttctggagtatctggatgtggacatttggagcgctttgatgcctacggtggaaaaggaaatatcttcccataaaaacgagacagaaggattctcagaaacaagtttgtgatgtgtgtactcagctaacagagtggaacatttctttttacagagcagctttgaaactctatttttctggattctgcaaattgatatttagattgctttaacgatatcgttggaaaagggaatatcgtcatacaaaatctagacagaagcattctcacaaacttgtttgtgatgtgtgtcctcaactaacagagttgaacctttcttttgatgcagcaatttggaaacacccttttggtagaaactgtaactggatatttggatagctctaacgatttcgttggaaacgggaatatcatcatctaaaatgtagacagaagcactattagaaactacttggtgatatctgcattcaagtcacagagttgaacattcccttactttgagcacgtttgaaacactcttttggaagaatctggaagtggacatttggagcgctttgatgcctttggtgaaaaggaaacgtcttccaataaaagccagacagaagcattctcagaaacttgttcgtgatgtgtgtactcaactaaaagagttgaacctttctattgatagcgcagttttgaaacactctttttgtggattctgcaagtggatatttggattgcttagaggatttcgttggaagcgggaattcgtataaacactagacagcagcattcccagaaatttctttcggatatttccattcaactcatagagatgaacatggcctttcatagagcaggtttgaaacactctttttgtagtttgtggaagtggacatttcgatcgccttgacgcctacgctgaaaaaggaaatatcttcccataaaaaatagacagaagcattctcagaaacttgttggtgatatgtgtcctcaactaacagagttgaactttgccattgatagagagcagttttgaaacactctttttgtggaatctgcaagtggatatttggatagcttggaggatttcgttggaagcgggaattcaaataaaaggtagacagcagcattctcagaaatttctttctgatgtctgcattcaactcatagagttgaagattccctttcatagagcaggtttgaaacactctttctggagtatctggatgtggacatttggagcgctttgatgcctacggtgaaaaagtaaatatcttgccataaaaacgacacagaaggattctcagaaagaagtttgtgatgtgtgtactcagctaacagagtggaacctctcttttgaagcagcagtttggaaacactctttttgtagaaactgtaagtggatatttggatagctctaatgatttcgttggaaacgggaatatcatcatctaaaatctagacagaaagccctctcagaaactactctgtgatatctgcattcaagtcacagagttgaacattcgttttcttagagcacgtttgaaacactctttttgtagtgtctggaagtggacatttggagcgctttgatgcctttggtgaaaaagggaatgtcttcccataaaaactagacagaagcattcgcagaaacttgtttgtgatgtgtgcacccagctaaaggagttgaacatttattgatagagcagttttgaagcactctttttgtggaaaatgcaagtggatatttggatagcttggaggatttcgttggaagcgggagttcaaataaaaggtagacagcagcattctcagaaatttctttctgatgtctgcattcaactcatagagttgaagattccctttcatagagcaggtttgaaacactctttctggagtatctggatgtggacatttggagcgctttgatgcctacggtgaaaaagtaaatatcttcccataataacgagacagaaggattctgagaaacaagtttgtgatgtgtgtactcagctaacagagtggaacctttctttttacagagcagctttggaactctatttttgtggattctgcaaatggatatttagattgctttaatgatatcgctggaaaagggaatatggtcatacaaaatctagacagaagcattctcacaaacttctttgtgatgtgtgtcctcaactaacagagttgaacttttcttttgatgcagcagtttggaaacactctttttgtagaaactgtaagtggatatttggatagctctaacgatttcgttggaaacgggaatatcatcatctaaaatctagacagaagcactattagaaactacttggtgatatctgcattcaagtcacagagttgaacattcccttactttgagcacgtttgaaacactcttttggaagaatctggaagtggacatttggagcgctttgatgcctttggtgaaaaggaaacgtcttccaataaaagccagacagaagcattctgagaaacttgttcgtgatgtgtgtactcaactaaaagagttgaacctttctattgatagagcagttttgaaacactctttttgtggattctgcaagtggatatttggattgctttgaggatttcgttggaagcgggaattcggtataaacactagacagcagcattcccagaaatttctttcggatatttccattcaactcatagagatgaacatggcccttcatagagcaggtttgaaacactctttttgtagtttgtggaagtggacatttcgatcgccttgacgcctacggtgaaaaaggaaatatcttcccataaacaatagacagaagcattctcagaaacttgttggtgatatgtgtcctcaactaacagagttgaactttgccattgatagagagcagttttgaaacactctttttgtggaatctgcaagtggatatttggatagcttggaggatttcgttggaagcgggaattcaaattaaaggtagacagcagcattctcagaaattttttctgatgtctgcattcaactcatagagttgaagattccctttcatagagcaggtttgaaacactctttctggagtatctggatgtggacatttggagcgctttgatgcctacggtgaaaaagtaaatatcttcccataaaaacgagacagaaggattctgagaaacaagtttgtgatgtgtgtactcagctaacagagtggaacctctcttttgatgcagcagtttggaaacactctttttgtagaaactgtaagtggatatttggatagctctaatgattttgttggaaacgggattatcatcatctaaaatctagacagaagcactctcagaaactactttgtgatatctgcattcaagtcacagagttgaacattcgctttcttagagcacgttggaaacactctttttgtagtgtctggaagtggacatttggagcgctttgatgtctttggtgaaaaagggaatgtcttcccataaaaactagacagaagcattctcagaaacttgtttgtgatgtgtgtacccagctaaaggagttgaacatttctattgatagagcagttttgaaacactctttttgtggaaaatgcaagtgaatatttggatagcttggaggatttcgttggaagagggaattcaaataaaaggtagacagccagcattctcagaaatttctttctgatgtctgcattcaactcatagagttgaagattccctttcatagagcaggtttgaaacactctttctggagtatctggatgtggacatttggagcgctttgatgcctacggtggaaaagtaaatatcttcccataaaaacgagacagaggattctgagaaacaagtttgtaatgtgtgtactcagctaacagagtggaacctttctttttacagagcagctttgaaactctatttttgtggattctgcaaattgatatttagattgctttaacgatatcgttggaaaagggaatatcgtcatacaaaatctagacagaagcattctcacaaacttctttgtgatgtgtgtcctcaactaacagagttgaacctttcttttgatgcagcaatttggaaacacccttttggtagaaactgtaactggatatttggatagctctaacgatttcgttggaaacgggaatatcatcatctaatatctagacagaagcactattagaaactacttggtgatatctgcattcaagtcacagagttgaacattcccttactttgagcacgtttgaaacactcttttggaagaatctggaagtggacatttggagcgctttgatgcctttggtgaaaaggaaacgtcttccaataaaagccagacagaagcattctcagaaacttgttcgtgatgtgtgtactcaactaaaagagttgaacctttctattgatagagcagttttgaaacactctttttgtcgattctgcaagtggatatttggattgtttgaggatttcgttggaagcgggaattcgtataaaaactagacagcagcattcccagaaatttctttcggatatttccattcaactcatagagatgaacatggcctttcatagagcaggtttgaaacactctttttgtagtttgtggaagtggacatttcgatcgccttgacgcctacggtgaaaaaggaaatatcttcccataaaaaatagacagaagcattctcagaaacttgttggtgatatgtgtcctcaactaacagagttgaactttgccattgatagagagcagttttgaaacactctttttccggaatctgcaagtggatatttggatagcttggaggatttcgttggaagcgggaattcaaataaaaggtagacagcagcattctcagaaatttctttctgatgtctgcattcaactcatagagttgaacattccctttcatagggcaggtttgaaatactctttctgtagtatctggatgtggacatttggagcgctttgatgcctacggtgaaaaagtaaatatcttcccataaaaacgagacagaaggattctcagaaacaagtttgtgatgtgtgtactcagctaacagagtggaaccactcttttgatgtcagcagtttggaaacactctttttgtagaaactgtaagtggatatttggatagctctaatgatttcgttggaaacgggaatatcatcatgtaaaatctagacagaagccctctcagaaactactttgtgatatctgcattcaagtcacagagttgaacattcgctttcttagagcacgttggaaacactctttttgtagtgcctggaagtggacatttggagcgctttgatgcctttggtgaaaaagggaacgtcttcccataaaaactagacagaagcattctcagaaacttgtttgtgatgtgtgtacccagctaaaggagttgaacatttctattgatagagcagttttgaaaaactctttttgtggaaaatgcaagtggatatttggatagcttggaggatttcgttggaatcgggaattcaaataaaaggtagacagcagcattctcagaaattactttctgatgtctgcattcaactcatagagttgaagattccctttcatagagcaggtttgaaacactctttctgtagtatctggatgtggacatttggagcgctttgatacctacggtgaaaaagtaaatatcttcccataaaaactagacagaaggattctcagaaacaagtttgtgatgtgtgtactcagctaacagagtggaacctctcttttgatgcagcagtttggaaacactctttttgtagaaactgtaagtggatatttggatagctctaatgatttcgttggaaacgggaatatcatcatctaaaatactagacagaagccctctcaaaaactactttgtgatatctgcattcaagtcacagagttgaacattcgctttcttagagcacgtttgaaacactctttttgtagtgtctggaagtggacatttggagcgctttgatgcctttggtgaaaaagggaatgtcttcccataaaaactagacagaagcattctcagaaacttgtttgtgatgtgtgtacctagctaaaggagttgaacatttctattgatagagcagttttgaaacactctttttgtggaaaatgcaggtggatatttggataggttggaagatttcgttggaagcgggaattcaaataaatggtagacagcagcattctcagaaatttctttctgatgtctgcattcaactcatagagttgaagattccctttcatagagcaggtttgaaacactctttctggagtatctggatgtggacatttggagcgctttgatgcctacggtggaaaagtaaatatacttcccataaaaacgagacagaaggattctgagaaacaagtttgtgatgtgtgtactcagctaacagaagtggaacctttctttttacagagcagctttgaaactctatttttgtggattctgcaaatggatatttagattgctttaacgatatcgttggaaaagggaatatcgtcatacaaaatctagacagaaggattctcacaaacttctttgtgatgtgtgtcctcaactaacagagttgaacctttcttttgatgcagcagtttggaaacactctttttgtagaaactgtaagtggatatttggatagctctaacgatttcgttggaaacgggaatatcatcctgtaaaatctggacagaagcactattagaaactacttggtgatatctgcattcatgtcacagagttgaacattcccttactttgagcacgtttcaaacactcttttggaagaatctggaagtggacatttggagcgctttgatgcctttggtgaaaaggaaacgtcttccaataaaagccagacagaagcattctcagaaacttgtttgtgatgtgtgtactcaactaaaagagttgaacctttctattgatagagcagttttgaaacactctttttgtggattctgcaagtggatatttggattgctttgaggatttcgttggaagcgggaattcgtataaaaactagacagcagcattcccagaaatttctttcggatatttccattcgactcatagagatgaacatggcctttcatagagcaggtttgaaacactctttttgtagtttgtggaagtggacatttcgatcgccttgatgcctacggtgaaaaaggaaatatcttcccataaaaaatagacagaagcattctcagaaacttgttggtgatatgtgtcctcaactaacagagttgaactttgccattgatagagagcagttttgaaacactctttttgtggaatctgcaagtggatatttggatagcttggaggatttcgttggaagcgggaattcaaataaaaggtagacagcaggattctcagaaacaagtttgtgatgtgtgtactcagctaacagagtggatcctttctttttacagagcagctttgaaactctatttctgtggattctgcaaattgatatttgggttgatttaacgatatcgatggaaaagggaatatcttcatacaaaatctagacagaagctttctcagaaacttctttgtgatgtgtgtcctcaactcacagagttgaacctttctttagatgcagcagtttggaaacactctttttgtagaaactgtaagtggatatttgggtaggtctaacgatatcgttggaaacgagaataccttcatctaaagtatacacagaatcagtctcagaaactactttgtgatatctgcattccagtcacagagttgaaaactcccttacttagagcaggtttgaaacactctttttgtagaatctggaagtggacatttggagcgctttgatgcctttggttaaaaaggaaatgtcttcccttaagaagtagacagaagcattctcagaaacatgtttgtgatgtgtgtacccagctaaaggagttgaacatttctattgatagagcagttttgaaacactctttttgtggaaaatgcaagtggatatttggatagcttggaggatttcgttggaagcgggaattcaaataaaaggtagacagcagcattctcagaaatttctttctgatgtctgcattaaactcatagagttgaagattccctttcatagagcaggtttgaaacactctttctggagtatctggatgtggacatttggagcgctttgatgcctacggtgaaaaagtaaatatcttcccataaaaacgagacataaggattctgagaaacaagtttgtgatgtgtgtactcagctaacggagtggaacctctcttttgatgcagcagtttggaaacactctttttgtagaaactgtaagtggatatttggatagctctaatgatttcgttggaaacgggaatatcatcatctaaaatctagacagaagcactctcagaaactactgtgtgatatctgcattcaagtcacagagttgaacattcgctttcttagagcacgtttgaaacactctttttgtagtgtctggaagtggacatttggagcgctttgattcctttggtgaaaaagggaatgtctacccataaaaactagacagaagcattgtcagaaacttgtttgtgatgtgtgtacccagccaaaggagttgaacatttctattgatagagcaggtttgaaacactctttttgtggaaaatgcaggtggatatttggatagcttggaggatttcgttggaagcgggaattcaaataaaaggtagacagcagcattctcagaaatttctttctgatgtctgcattcaactcatagagttgaagattccctttcatggagcaggtttgaaacagtctttctggagtatctggatgtggacatttggagcgctttgatgcctacggtgaaaaagtaaatatcttcccataaaaacgagacagaaggattctgagaaacaagtttgtgatgtgtgtactcagctaacagagtggaacctctcttttgatgcagcagtttggaaacactctttttgtagaaactgtaagtggatatttggatagctctaatgatttcgttggaaacgggaatatcatcatctaaaatctagacagaagccctctcagaaactactttgtgatatctgcattcaagtcacagagttgaaccttcgctttcttagagcacgtttgaaacactctttttgtagtgtctggaagtggacatttggagcgctttgatgcctttggtgaaaaagggaatgtcttcccataaaaactagacagaagcattctcagaaacttgtttgtgatgtgtgtacccagctaaaggagatgaacatttctattgatagagcagttttgaaacactctttttgtggaaaatgcaagtggatatttggatagcttggaggatttcgttggaagcgggaattcaaataaaaggtagacagcagcattctcagaaatttctttctgatgtctgcattcaactcatagagttgaagattccctttcatagggcaggtttgaaacactctttctggagtatctggatgtgcacatttggagcgctttgatgcctacggtggaaaagtaaatatcttcccataaaaacgagacagaaggattctcagaaacaagtttgtgatgtgtgtactcagctaacagagtggaacctttctttttacagagcagctttgaaactctagttttgtggattctgcaaattgatatttagattgctttaacgatatcgttggaaaagggaatatcgtcatacaaaatctagacagaagcattctcacaaacttctttgtgatgtgtgtcctcaactaacagagttgaacctttcttttgttgcagcaatttggaaacacccttttggtagaaactgtaactggatatttggatagctctaacgatttcgttggaaaagggaatatcatcatctaaaatgtagacagaagccctctcagaaactactttgtgatatctgcattcaagtcacagagttgaacattcgctttcttagagcacgtttgaaacactcttttggaagaatctggaagtggacatttggagcgctttgatgcctttggtgaaaaggaaacgtcttccaataaaagccagacagaagcattctcagaaacttgtttgtgatgtgtgtactcaactaaaagagttgaacctttctattgatagcgcagttttgaaacactctttttgtggattctgcaagtggatatttggattgctttgaggatttcgttggaagcgggaattcatataaaaactagacagcagcattcccagaaatttctttcggatatttccattcaactcatagagatgaacatcgcctttcatagagcaggtttgaaacactctttttgtagtttgtggaagtggacatttcgatcgccttgacgcctacggtgaaaaaggaaatatcttcccataaaaaatagacagaagcattctcagaaacttgttggtgatatgtgtcctcaactaacagagttgaactttgccattgatagagagcagttttgaaacactctttttgtggaatctgcaagtggatatttggatagcttggaggatttcgttggaagcgggaattcaaataaaaggtagacagcagcattctcagaaatttctttctgatgtctgcattcaactcatagagttgaagattccctttcatagagcaggtttgaaagactctttctggagtatctggatgtggacatttggagcgctttgatgcctacggtggaaaagtaaatatcttcccataaaaacgagacagaaggattctcagaaacaagtttgtgatgtgtgtactcagctaacagagtggaacctttctttttacagagcagctttgaaactctattgttgtggattctgcaaattgatatttagattgctttaacgatatcgttggaaaagggaataccgtcatacaaaatctggacagaagcactctcacaaacttctttgtgatgtgtgtcctcaactaacagagttgaacctttcttttgatgcagcaatttggaaacacccttttggtagaaactgtaactggatatttggatagctctaacgatttcgttggaaacgggaatatcatcatctaaaatctagacagaagcactattagaaactacttagtgatatctgcattcaagtcacagagttgaacattcccttactttgagcacgtttgaaacactcttttggaagaatctggaagtggacatttggagcgctttgatgccttgtgtgaaaaggaaacgtcttccaataaaagccagacagaagcattctcagaaacttgtttgtgatgtgtgtactcaactaaaagagttgaacctttctattgatagagcagttttgaaacactctttttgtggattctgcaagtggatatttggattgctttgaggatttcgttggaagcgggaattcgtataaaaactagacagcagcattcccagaaatttctttcggatatttccattcaactcatagagatgaacatggcctttcatagagcatgtttgaaacactctttttgtagtttgtggaagtggacatttcgatcgccttgacgcctacggtgaaaaaggaaatatcttcccataaaaaatagacagaagcattctcagaaacttgttggtgatatgtgtcctcaactaacagagttgaactttgccattgatagagagcagttttgaaacactctttttgtggaatctgcaagtggatatttggatagcttggaggatttcgttggaagcgggaattcaaataaaaggtagacagcagcattctcagaaatttctttctgatgtctgcattcaactcatagagttgaagattccctttcatagagcaggtttgaaacactctttctggagtatctggatgtggacatttggagcgctttgatgcccacggtgaaaaagtaaatatcttcccagaaaaacgagacagaaggattctgagaaacaagtttgtgatgtgtgtactcagctaacagagtggaacctttctttttacagagcagctttgaaactctatttttgtggattctgcaaatggatacttagattgctttaacgatatcgttggaaaagggaatatcgtcatacaaaatctagacagaagcattctcacaaacagctttgtgacgtgtgtcctcaactaacagagttgaacttttcttttgatgcagcagtttggaaacacccttttggtagaaactgtaagtggatatttggatagctctaacgatttcgttggaaacgggaatatcatcatctaaaatctagacagaagcactattagaaactacttggtgatatctgcattcaagtcacagagttgaacattcccttacttcgaccacgtttgaaacactcttttggaagaatctggaagtggacatttggagcgctttgatgcctttgttgaaaaggaaacgtcttccaataaaagccagacagaagcattctcagaaacttgtttgtgatgtgtgtactcaactaaaagagttgaacctttctattgatagagcagttttgaaacactctttttgtggattctgcaagtggatatttggattgctttgaggatttcgttggaagcgggaattcgtataaaaactagacagcagcattcccagaaatttctttcggatatttccattcgactcatagagatgaacatggcctttcatagagcaggtttgaaacactctttttgtagtttgtggaagtggacatttcgatcgccttgacgcctacggtgaaaaaggaaatatcttcccataaaaaatagacagaagcattctcagaaacttgttggtgatatgtgtcctcaactaacagagatgaactttgccattgatagagagcagttttgaaacactctttttgtggaatctgcaagtggatatttggatagcttggaggatttcgttggaagcgggaattcaaataaaaggtagacagcaggtttctcagaaacaagtttgtgatgtgtgtactcagctaacagagtggaacctttctttttaaagagcagctttgaaactctatttttgtggattctgcaaattgatatttagattgctttaacgatatcgttggaaaagggaatatcgtcatacaaaatctagacagaagcattctcacaaacttctttgtgatgtgtgtcctcaactaacagagttgaaactttcttttgatgcagcaatttggaaacagccttttggtagaaactgtaactggatatttggatagctctagcgatttcgttggaaacgggaatatcatcatctaaaatctagacagaagcactattagaaattacttggtgatatctgcattcaagtcacagagttgaacattcccttactttgagcacgtttcaaacactcttttggaagaatctggaagtggacatttggagcgctttgatgcctttggtgaaaaggaaacgtcttccaataaaagccagacagaagcattctcagaaacttgtttgtgatgtgtgtactcaactaaaagagttgaacctttctattgatagagcagttttgaaacactctttttgtggattctgcaagtggatatttggattgctttgaggatttcgttggaagcgggaattcgtataaaaactagacagcagcattcccagaaatttctttcggatatttccattcgactcatagagatgaacatggcctttcatagagcaggtttgaaacactctttttgtagtttgtggaagtggacatttcgatcgccttgacgcctacggtgaaaaaggaaatatcttcccataaaaaatagacagaagcattctcagaaacttgttggtgatatgtgtcctcaactaacagagttgaactttgccattgatagagagcagttttgaaacactctttttgtggaatctgcaagtggatatttggatagcttggaggatttcgttggaagcgggaattcaaataaaaggtagacagcagcattctcagaaatttctttctgatgtctgcattcaactcatagagttgaagattctctttcatagagcaggtttgaaacactctttctggagtatctggatgtggacatttggagcgctttgatgcctacggtgaaaaagtaaatatcttcccagaaaaacgagacagaaggattctcagaaacacgtttgtgatgtgtgtactcagctaacagagtggaacctttctttttacagagcagctttgaaactctatttttgtggattctgcaaattgatatttagattgctttaacgatatcgttggaaaagggaatatcgtcatacaaaatctggacagaagcattctcacaaacttctttgtgatgtgtgtcctcaactaacagagttgaacctttcttttgatgcagcagtttggaaacactgtttttgtagcaactgtaagtggatatttggatagctctaacgatttcgttggaaacgggaatatcatcatctaaaatctagacagaaagcactattagcaaactacttggtgatatctgcattcaagtcacagagttgaacattcccttactttgagcacgtttcaaacactcttttggaagaatctggaagtggacatttggagcgctttgatgcctttggtgaaaaggaaacgtcttccaataaaagccagacagaaagcattctcagaaacttgtttgtgatgtgtgtactcaactaaaagagttgaacctttctattgatagagcagttttgaaacactctttttgtggattctgcaagtggatatttggattgctttgaggatttcgttggaagcgggaattcgtataaaaactagacagcagcattcccagaaatttctttcggatatttccattcgactcatagagatgaacatggcctttcatagagcaggtttgaaacactctttttgtagtttgtggaagtggacatttcgatcgccttgacgcctacggtgaaaaaggaaatatcttcccataaaaaatagacagaagcattctcagaaacttgttggtgatatgtgtcctcaactaacagagttgaactttgccattgatagagagcagttttgaaacactctttttgtggaatctgcaagtggatatttggatagcttggaggatttcgttggaagcgggatttcaaataaaaggtagacagcagcattctcagaaatttctttctgatgtctgcattcaactcatagagttgaagattccctttcatagagcaggtttgaaacactctttctggagtatctggatgtggacatttggagcgctttgatgcctacggtgaaaaagtaaatatcttcccataaaaacgacacagaaggattctcagaaacaagtttgtgatgtgtgtactcagctaacagagtggaacctctcttttgatgcagcagtttggaaacactctttttgtagaaactgtaagtggatatttggatagctctaatgatttcgttggaaacgggaatatcatcatctaaaatctagacagaaggactctcagaaactactttttgatatctgcattcaagtcacagagttgaacattcgctttcttagagcacttttgaaacactctatttgtcgtatctggaagtggacatttggagctctttgatgcctttggtgaaaaaggaaatgtcttcccataaaaactagacagaagcattctcagaaacttgtttgtgatgtgtgtacccagctaaaggagctgaacatttctattgatagagcagttttgaaacactctttttgtggaaaatgcaagtggatatttggatagcttggaggatttcgttggaagcgtgaattcaaataaaaggtagacagcagcattctcagaaatttctttctgatgtctccattcaactcatagagttgaagattccctttcatagagcaggtttgaaacactctttctggagtatctggatgtggacatttggagcgctttgatgcctacggtgaaaaagtaaatatcttcccataaaaacgagacagaaggattctcagaaacaagtttgtgatgtgtgtactcagctaacagagtggaacctttctttttacagagcagctttgaaactctatttttgtggattctgcaaattgatatttagattgctttaacgatatcgttggaaaagggaatatcgtcatacaaaatctggactgaagcattctcacaaacttctttgtgatgtgtgtcctcaactaacagagttgaacttttcttttgattcagcagtttggaaacactgtttttgtagaaactgtaagtggatatttggatagctctaacgatttcgttggaaacgggaatatcatcatctaaaatctagacagaagcactattagaaactacttggtgatatctgcattcaagtcacagtgttgaacattcccttactttgagcacgtttgaaacactcttttggaagaatctggaagtggacatttggaacgttttgatgcctttggtgaaaaggaaacgtcttccaataaaagccagacagaagcattctcagaaacttgtttgtgatgtgtgtactcaactaaaagagttgaacctttctattgatagagcagttttgaaacactctttttgtggattctgcaagtggatatttggattgctttgaggatttcgttggaagtgggaattcgcataaaaactagacagcagcattcccagaaatttctttcggatatttccattcgactcatagagatgaacatggcctttcatagagcaggtttgaaacactctttttgtagtttgtggaagtggacatttcgatcgccttgacgcctacggtgaaaaaggaaatatcttcccataaaaaatagacagaagcattctcacaaacttgttggtgatatgtgtcctcaactaacagagttgaactttgccattgatagagagcagttttgaaacactctttttgtggaatctgcaagtggatatttggatagcttggaggatttcgttggaagcgggaattcaaataaaaggtagacagcagcattctcagaaatttctttctgatgtctgcattcaactcatagagttgaagattccctttcatagagcaggtttgaaacactctttctggagtatctggatgtggacatttggagcgctttgatgcttacggtgaaaaagtataatcttcccataaaaacgagacagaaggattctgagaaacaagtttgtgatgtgtgtactcagctaacagattggaacctctcttttgatgcagcagtttggaaacactcgttttgtagaaactgtaagtgcatatttggatagctctaatgatttcgttggaaacgggaatatcatcatctaaaatctagacagaagcactctcagaaactactttgtgatatctgcattcaagtcacagagttgaacattcgctttcttagagcacgtttgaaacactctttttgtagtgtctggaagtggacatttggagcgctttgtttcctttggtgaaaaagggaatgtctacccataaaaactagacagaagcattctcagaaacttgtttgtgatgtgtgtacccagccaaaggagttgaacatttctattgatagagcagttttgaaacactctttttgtgtaaaatgcaggtggatatttggatagcttggaggatttcgttggaagcgggaattcaaataaaaggtagacagcagcattctcagaaatttctttctgatgtctgcattcaactcatagagttgaagattccctttcatagagcaggtttgaaacacttgttctggagtatctggatgtggacatttggagcgctttgatgcctacggtggaaaagtaaatatcttcccataaaaacgagacagaaggattctcagaatcaagtttgtgatgtgtgtactcagctaacagagtggaacctttctttttacagagcagctttgaaactctatttttgtggattctgcaaattgatatttagattgctttaacgatatcgttggaaaagggaatatcgtcatacaaaatctagacagaagcattctcacaaacttctttgtgatgtgtgtcctcaactaacagagttgaacctttcttttgatgcagcagtttggaaacacccttttggtagaaactgtaagtggatatttggatagctctaacgatttcgttggaaacggtaatatcataatctaaaatctagacagaagcactattagaaactacttggtgatatctgcattcaagtcacagagttgaacattcccttactttgagcacgtttgaaacactcttttggaagaatctggaagtggacatttggagcgctttgatgcctttggtgaaaaggaaacatcttccaataaaagccagacagaagcattctcagaaacttgtttgtgatgtgtgtactcaactaaaagagttgaacctttctattgatagagcagttttgaaacactctttttgtggattctgcaagtggatatttggattgctttgaggatttcgttggaagcgggaattcgtataaaaactagacagcagcattcccagaaatttctttcggatatttccattcgactcatagagatgaacatggcctttcatagagcaggtttgaaacactctttttgtagtttgtggaagtggacatttcgatcgccttgacgcctacggtgaaaaaggaaatatcttcccataaaaaatagacagaagcattctcagaaacttgttggtgatatgtgtcctcaactaacagagttgaactttgccattgatagagagcagttttgaaacactctttttgtggaatctgcaagtggatatttggatagcttggaggatttcgttggaagcgggaattcaaataaaaggtagacagcagcattctcagaaatttctttctgatgtctgcattcaactcatagagttgaacattccctttcatagagcaggtttgaaacactctttctggagtatctggatgtggacatttggagcgctttgatgcctacggcgaaaaagtataatcttcccataaaaacgagacagaagctttctcagaaaattctttgtgatgtgtgtcctcaactaacagagttgaacctttctttagatgcagcagtttggaaacactctttttgtagaaactgtaagtggatatttggataggtctaacgatatcgttggaaacgggaatatcttcatctaaagtatacacagaagcagtctcagaaactacattgtgatatctgcattccagtcacagagttgaaaactcccttacttagagcaggtttgaaacactctttttgtagaatctggaagtggacatttggaacgctttgatgcctttggtgaaaaaggaaatgtcttcccttaaaaagtagacagaagcattctcagaaacttgtttgtgatgtgtgtacccagccaaaggagttgaacatttctattgatagagcagttttgaaacactcttgttgtggaaattgcaggtggatatttggatagcttggaggatttcgttggaagcgggaattcaaataaaaggtagacagcagcattctcagaaatttctttctgatgtctgcattcaactcatagagttgaagattccctttcatagagcaggtttgaaacactctttctggagtatctggatgtggacatttggagcgctttgatgcctatggtgaaaaagtaaatatcttcccagaaaaacgagacagaaggattctctgaaacaagtttgtgatgtgtgtactcagctaactgagtggaacctttctttttacagagcagctttgaaactctatttttgtggattctgcaaattgatatttagattgctttaacgatatcgttggaaaagggaatatcgtcatacaaaatctggacagaagcattctcacaaacttctttgtgatgtgtgtcctcaactaacagagttgaacctttcttttgatgcagcagtttggaaacactctttttgtagaaactgtaagtggatatttggatagctctaacgatttcgctggaaacgggaatatcgtcatctaaaatctagacagaagcactattacaaactacttggtgatatctgcattcaagtcacagagttgaacattcccttactttgagcacgtttgaaacactcttttggaagaatctggaagtggacatttggagcgctttgatacctttgttgaaaaggaaacgtcttccaataaaagccagacagaagcattctcagaaacttgtttgtgatgtgtgtactcaactaaaagagttgaacctttctattgatagagcagttttgaaacactctttttgtggattctgcaagtggatatttggattgctttgaggatttcgttggaagcgggaattcgtataaaaactagacagcagcattcccagaaatttctttcggatatttccattcgactcatagacatgaacatggcctttcatagagcaggtttgaaacactctttttgtagtttgtggaagtggacatttcgatcgccttgacgcctacggtgaaaaaggaaatatcttcccataaaaaatagacagaagcattctcagaaacttgttggtgatatgtgtcctcaactaacagagttgaactttgccattgatagagagcagttttgaaacactctttttgtggaatctgcaagtggatatttggatagcttggaggatttcgttggaagcgggaattcaaataaaaggtagacagcagcattctcagaaatttctttctgatgtctgcattcaactcatagagttgaacattccctttcatagagcaggtttgaaacactctttctggagtatctggatgtggacatttggagcgctttgatgcctacggtgagaaagtaaatatcttcccataaaaacgagacagaaggattctgagaaacaagtttgtgatgtgtgtactcagctaacagagtggaacctctctttttgatgcagcagtttggaaacactctttttgtagaaactgtaagtggatatttggatagctctaatgatttcgttggaaacgggaatatcatcatctaaaatctagacagaagccctctcagaaactactttgtgatatctgcattcaagtcacagagttgaacattcgctttcttagagcacgttggaaacactctttttgtagtgtctggaagtggacatttggagcgctttgatgcctttggtgaaaaagggaatgtgttcccataaaaactagacagaagcattcccagaaacttgtttgtgatgtgtgtacccagctaaaggagttgaattttgcattgatagagagcagttttgaaaccctctttttgtggaaaatgcaagtggatatttgtatagcttggaggatttcgttggaagcgggaattcaaataaaaggtagacagcagcattctcagaaatttctttctgatgtctgcattcaactcatagagttgaagattccctttcatagagcaggtttgaaacagtctttctggagtatctggatgtggacatttggagcgctttgatgcctacggtgaaaaagtaaatatcttcccataaaaacgagacagaaggattctcagaaacaagtttgtgatgtgtgtactcagctaacagagtggaacctttctttttacagagcagctttgaaactctatttttctggattctgcaaattgatatttagattgctttaacgatatcgttggaaaagggaatatcgtcatacaaaatctagacagaagcattctcacaaacttctttgtggtgtgtgtcctcaactaacagagttgaaccttttttttgatgcagcaatttggaaacaccctttttgtagaaactgtaactggatatttgcttagctctaacgatttcgttggaaacgggaatatcatcatctaaaatctagacagaagcactattagaaactacttggtgatatctgcattcaagtcacagagttgaacattcccttactttgagcacgtttgaaacactcttttggaagaatctggaagtggacatttggagcgctttgatgcctttggtgaaaaggaaacgtcttccaataaaagccagacagaagcattctcagaaacttgtttgtgatgtgtgtactcaactaaaagagttgaacctttctattgatagagcagttttgaaacactctttttgtggattctgcaagtggatatttggattgctttgaggatttcgttggaagcgggaattcgtataaacactagacagcagcattcccagaattttctttcggatatttccattcaactcatagagatgaacatggcctttcatagagcaggtttgaaacactctttttgtagtttgtggaagtggacatttcgatcgccttgacgcctacggtgaaaaaggaaatatcttcccataaaaaatagacagaagcattctcagaaacttgtttgtgatgtgtgtacctagctaaaggagttgaacatttctattgatagagcagttttgaaacactctttttgtggaaaatgcaggtggatatttggataggttggaagatttcgttggaagcgggaattcaaataaaaggtagacagcagcattctcagaaatttctttctgatgtctgcattcaactcatagagttgaagattccctttcgtagagcaggtttgaaacactctttctggagtatctggatgtggacatttggagcgctttgatgcctacggtgaaaaagtaaatatcttcccataaaaacgagacagaaggattgtgagaaacaagtttgtgatgtgtgtactcagctaacagagtggaacctctcttttgatgcagcagtttggaaactctctttttgtagaaactgtaagtggatatttggatagctctaatgatttcgttggaaacgggaatatcatcatctaaaatctagacagaagccctctcagaaactactttgtgatatctgcattcaagtcacagagttgaacattctgctttcttagagcacgtttgaaacactctttttgtagtgtctggaagtggacatttggagcgctttgatgtctttggtgaaaaagggaatgtcttcccataaaaactagacagaagcattctcagaaacttgtttgtgatgtgtgtacccagccaaaggagttgaacatttctattgatagagcagttttgaaacactcttgttgtggaaaatgcaagtggatatttggatagcttggaggatttcgttggaagccggaattcaaataaaaggtagacagccagcattctcagaaatttctttctgatgtctgcattcaactcatagagttgaagattccctttcattgagcaggtttgaaacagtctttctggagtatctggatgtggacatttggagcgctttgatgcctacggtgaaaaagtaaatatcttcccataaaaacgagacagaggaatctcagaaacaagtttgtgatgtgtgtactcagctaacagagtggaacctttctttttacagagcagctttgaaactctatttttgtggattctgcaaatggatatttagattgctttaacgatatcgttggaaaagggaatatcatcatacaaaatctggacagaagcattctgacaaacttctttgtgatgtgtgtcctcaactaacagagttgaacctttcttttgatgcagcagtttggaaacacccttttggtagaaactgtaagtggatatttggatagctctaacgatttcgttggaaacgggaatatcatcatctaaaatctagacagaagcactactagaaactacttggtgatatctgcattcaagtcacagagttgaacattcccttactttgagcacgtttcaaacactcttttggaagaatctggaagtggacatttggagcgctttgatgcctttggtgaaaaggaaacgtcttccaataaaagccagacagaagcattctcagaaacttgtttgtgatgtgtgtactcaactaaaagagttgaacctttctattgatagagcagttttgaaacactctttttgtggattctgcaagtggatatttggattgctttgaggatttcgttggaagcgggaattcgtataaaaactagacagcagcattcccagaaatttctttcggatatttccattcgactcatagagatgaacatggcctttcatagagcaggtttgaaacactctttttgtagtttgtggaagtggacatttcgatcgccttgaccgcccacggtgaaaaaggaaatatcttcccataaaaaatagacagaagcattctcagaaacttgttggtgatatgtgtcctcaactaacagagttgaactttgccattgatagagagcagttttgaaacactctttttcctgaatctgcaagtggatatttggatagtttggaggatttagttggaagcgggaattcaaataaaaggtagacagcagcattctcagaaatttctttctgatgtctgcattcaactcatagagttgaagattccctttcatagagcaggtttgaaacactctttctggagtatctggatgtggacatttggagcgctttgatgcctacggtgaaaaagtaaatatcttcccagaaaaacgagacagaaggattctcagaaacaagtttgtgatgtgtgtactcagctaacagagtggaacctttctttttacagagcagctttgaaagtctatttttgtggattctgcaaattgatatttagattgctttaacgatatcgttggaaaagggaatatcgtcatacaaaatctagacagaagcattctcacaaacttctttgtgatgtgtgtcctcaactaacagacttgaacctttcttttgatgcagcagtttggaaacacccttttggtagaaactgtaactggatatttggatagctctaacgatttcgttggaaacgggaatatcatcatctaaaatctagacagaagcactattagaaactacttgtgatatctgcatgcaagtcacagagttgaacattcccttactttgagcacgtttgaaacactcttttgtaagaatctggaagtggacgtttggagctctttgatgcctttggtgaaaaggaaacatcttccaataaaagccagaaagaagcattctcagaaacttctttgtgatgtgtgtactcaactaaaagtgttgaacctttctattgatagagcagttttgcaacactctttttgtggattctgcaagtggatatttggattgctttgaggatttcgttggaagcgggaattcgtataaaaactagacagcagcattttcagaaatttctttcggatatttccattcaactcatagagatgaacatggcctttcatagagcaggtttgaaacactctttttgtagtttgtggaagtggacattttgatcgccttgacgcctatggtgaaaaagggaatatcttcccataaaaaatagacagaagcattctcagaaacttgttggtgatatgtgtcctcaactaacagagttgaactttgccattgatagagagcagttttgaaacactctttttgtggaatctgcaagtggatatttggatagcttggaggatttcgttggaagcgggaattcaaataaaaggtagacagcagcattctcagaaatttctttctgatgtctgcattcaactcatagagttgaacattccctttcatagagcaggtttgaaacactctttctgtagtatctggatgtggacatttggagcgctttgatgcctacggtgaaaaagtataatcttcccataaaaacgagacagaaggattctcagaaacaagtttgtgatgtgtgtactcagctaacagagtggaacctctcttttgatgcagcagtttggaaacactctttttgtagaaactgtaagtggatatttggatagctctaatgatttcgttggaaacgggaatatcatcatgtaaaatctagacagaagcactctcagaaactactttgtgatatctgctttcaagtcacagagttgaacattcgttttcttagagcacttttgaaacactctttttgtagtatctggaagtggacatttggagctctttgatgcctttggtgaaaaaggaaatgtcttcccataaaaactagacagaatcattctcagaaacttgtttgtgatgtgtgtacccagccaaaggagttgaacatttctattgatagagcagttttgaaacactctttttgtggaaaatgcaagtggatatttggatagcttggaggatttcgttggaagcgggaattcaaataaaaggtagacagcaggattctcagaaacaagtttgtgatgtgtgtactcagctaacagagtggaacctttctttttacagagcagctttgtaactctatttttgtggattctgcaaattgatatttagattgctttaacgatatcgttggaaaagggaatatcgtcatacaaaatctagacagaagcattctcgcaaacttctttgtgatgtgtgtcctcaactaacagagttgaacctttcttttgatgcagcaatttggaaacacccttttggtagaaactgtaactggatatttggatagctctaacgatttcgttggaaacgggaatatcatcatctaaaatgtagacagaagcactattagaaactacttggtgatatctgcattcaagtcacagagtagaacattcccttacttcgagcacgtttgaaacactcttttggaagaatctggaagtggacatttggagcgctttgatgcctttggtgaaaaggaaacgtcttccaataaaagccagacagaagcattctcagaaacttggttgtgatgtgtgtactcaactaaaagagttgaacctttctattgatagagcagttttgaaacactctttttgtggattctgcaagtggatatttggattgctttgaggatttcgttggaagcgggaattcatataaaaactagacagcagcattcccagaaatttctttcggatatttccattcaactcatagagatgaacatcgcctttcatagagcaggtttgaaacactctttttgtagtttgtggaagtggacatttcgatcgccttgacgcctacggtgaaaaaggaaatatcttcccataaaaaatagacagaagcattctcagaaacttgttggtgatatgtgtcctcaactaacagagttgaactttgccattgatagagagcagttttgaaacactctttttgtggaatctgcaagtggatatttggatagcttggaggatttcgttggaagcgggaattcaaataaaaggtagacagcagcattctcagaaatttctttctgatgtctgcattcaactcatagagttgaagattccctttcatagagcaggtttgaaacactctttctggagtatctggatgtggacatttggagcgctttgatgcctacggtgaaaaagtaaatatcttcccataaaaacgcgacagaaggattctcagaaacaactttgtgatgtgtgtactcagctaacagagtggaacctctcttttgatgcagcagtttggaaacactctttttgtagaaactgtaagtggatatttggatagctctaatgatttcgttggaaacgggaatatcatcatctaaaatctagacagaagccctctcagaaactacgttgtgatatctgcattcaagtcacagagttgaatattcgctttcttagagcacgtttgaaacactctttttgtagtgtctggaagtggacatttggagcgctttgatgcctttggtgaaaaagggaatgtcttcccataaaaactagacagaagcattctcagaaacttgtttgtgatgtgtgtacccagctaaaggagttgaacatttctattgatagagcagttttgaaacactctttttgtggaaaatgcaagtggatatttggatagcttggaggatttcgttggaagcaggaattcaaataaaaggtagacagcagcattctcagaaatttctttctgatgtctgcattcaactcatagagttgaagattccctttcctagagcaggtttgaaacactctttctggagtatctggatgtggacatttggagcgctttgatgcctacggtgaaaaagtaaatatcttcccataaaaacgagacagaaggattctgagagacaagtttgtgatgtgtgtactccagctaacagagtggaacctttctttttacagagcagctttgaaactctatttttgtggattctgcaaatggatatttagattgctttaacgatatcgttggaaaagggaatatcgtcatacaaaatctggacagaagcattctcacaaacttctttgtgatgtgtgtcctcaactaacagagttgaacctttcttttgatgcagcagtttggaaacactgtttttgtagcaactgtaaggggatatttggatagctctaacgatttcgttggaaacgggaatatcatcatctaaaatctagacagaagcactattagcaaactacttggtgatatctgcattcaagtcacagagttgaacattcccttactttgagcacgtttcaaacactcttttggaagaatctggaagtggacatttggagcgctttgatgcctttggtgaaaaggaaacgtcttccaataaaagccagacagaagcattctcagaaacttgtttgtgatgtgtgtactcaactaaaagagttgaacctttctattgatagagcagttttgaaacactctttttgtggattctgcaagtggatatttggattgctttgaggatttcgttggaagcgggaattcgtataaaaactagacagccagcattcccaggaaatttctttcggatatttccattcaactcatagagatgaacatggcctttcatagagcaggtttgaaacactctttttgtagtttgtggaagtggacatttcgatcgccttgacgcctacggtgaaaaaggaaatatcttcccataaaaaatagacagaagcattctcagaaacttgttggtgatatgtgtcctcaactaacagagttgaactttgccattgatagagagcagttttgaaacactctttttgtggaatctgcaagtggatatttggatagcttggaggatttcgttggaagcgggaattcaaataaaaggtagacagcagcattctcagaaattactttctgatgtctgcattcaactcatagagttgaagattccctttcatagagcaggtttgaaacactctttctggagtatctggatgtggacatttggagcgctttgatgcctacggtgaaaaagtaaatatcttcccataaaaacgagacagaagcattctcacaaacttctttgtgatgtgtgtcctcaactaacagagttgaacttttcttttgatgcagcagtttggaaacactctttttgtagaaactgtaagtggatatttggatagctctaatgatttcgttggaaacgggaatatcatcatctaaaatctagacagaagccctctcagaaactactttgtgatatctgcattcaagtcacagagttgaacattcgctttcttagagcacgttggaaacactctttttgtagtgtctggaagtggacatttggagcgctttgatgcctttggtgaaaaagggaatatcttcccataaaaactagacagaagcattctcagaaacttgtttgtgatgtgtgtacccagccaaaggagttgaacatttctattaatagagcagttttgaaacgctctttttgtggaaaatgcaggtggatatttggatagcttggaggatttcgttggaagcgggaattcaaataaaaggtagacagccagcattctcagaaaatttccttctgatgtctgcattcaactcatagagttgaagactccctttcatagagcaggtttgaaacactctttctggagtatctggatgtggacatttggagcgctttgatgcctacggtgaaaaagtaaatatcttcccataaaaacgagacagaggattctgagaaacaagtttgtgatgtgtgtactcagctaacagagtggaacctttctttttacagagcagctttgaaactctatttttgtggattctgcaaatggatatttagattgctttaatgatatcgctggaaaagggaatatggtcatacaaaatctagacaggaagcattctcacaaacttctttgtgatgtgtgtcctcaactaacagagttgaacttttcttttgatgcagcagtttggaaacactctttttatagaaactgtaagtggatatttggatagctctaacgatttcgttggaaacgggaatatcatcatctaaaatctagacagaagcactattagaaactacttggtgatatctgcattcaagtcaaagagttgaacattcccttactttgagcacgtttgaaacactcttttggaagaatctggaagtggacatttggagcgctttgatgcctttggtgaaaaggaaacgtcttctaataaaagccagacagaagcattctcagaaacttgtttgtgatgtgtgtactcaactaaaagagttgaacctttctattgatagagcagttttgaaacactctttttgtggattctgcaagtggatatttggattgctttgaggatttcgttggaagcgggaattcgtataaaaactagacagcagcattcccagaaatttctttcggatatttccattcgactcatagagatgaacatggcctttcgtagagcaggtttgaaacactctttttgtagtttgtggaagtggacatttcgatcgccttgacgcctacggtgaaaaaggaaatatcttcccataaaaaatagacagaagcattctcagaaacttgttggtgatatgtgtcctcaactaacagagttgaactttgccattgatagagagcagttttgaaacactctttttgtggaatctgcaagtggatatttggatagcttggaggatttcgttggaagcgggaattcaaataaaaggtagacagcaggattctcagaaacaagtttgtgatgtgtgtactcagctaacagagtggaacctctctttttacagagcagctttgaaactctatttttgtggattctgcaaattgatatttagattgctttaacgatatcgttggaaaagggaatatcgtcatacaaaatctagacagaaagcattctcacaaacttctttgtgatgtgtgtcctcaactaacagagttgaacctttcttttgatgcagcagtttggaaacactctttttgtagcaactgtaagtggatatttggatagctctaacgatttcgttggaaacgggaatatcatcatctaaaatctagacagaagcactattagaaactacttggtgatatctgcattcaagtcacagagttgaacattcccttactttgagcacgtttcaaacactcttttggaagaatctggaagtggacatttggagcgctttgatgcctttggtgaaaaggaaacgtcttccaataaaagccagacagaagcattctcagaaacttgtttgtgatgtgtgtactcaactaaaagagttgaacctttctattgatagagcagttttgaaacactctttttgtggattctgcaagtggatatttggattgctttgaggatttcgttggaagcgggaattcgtataaaaactagacagcagcattcccagaaatttctttcggatatttccattcgactcatagagatgaacatggcctttcatagagcaggtttgaaacactctttttgtagtttgtggaagtggacatttcgatcgccttgacgcctacggtgaaaaaggaaatatcttcccataaaaaatagacagaagcattcccagaaatttctttcggatatttccattcgactcatagagatgaacatggcctttcatagagcaggtttgaaacactctttttgtagtttgtggaagtggacatttcgatcgccttgacgcctacggtgaaaaaggaaatatcttcccataaactaacagagcattctcagaaatttctttctgatgtctccattcaactcatagagttgaagattccctttcatagagcaggtttgaaacactctttctggagtatctggatgtggacatttggagcgctttgatgcctacggtgaaaaagtaaatatcttcccataaaaacgagacagaaggattctcagaaacaagtttgtgatgtgtgtactcagctaacagagtggaacctttctttttacagagcagctttcaaactctatttttgtggattctgcaaattgatatttagattgctttaacgatatcgttggaaaagggaatattgtcatacaaactctggacagaagcattctcacaaaacttctttgtgatgtgtgtcctcaactaacagagttgaacctttcttttgatgcagcagtttggaaacactctttttgtagaaactgtaagtggatatttggatagctctaacgatttcgttggaaacgggaatatcatcatctaaaatctagacagaagcactattagaaactacttggtgatatctgcattcaagtcacagagttgaacattcccttactttgagcacgtttcaaacactcttttggaagaatctggaagtggacatttggagcgctttgatgcctttggtgaaaaggaaacgtcttccaataaaagccagacagaagcattctcagaaacttgtttgtgatgtgtgtactcaactaaaagagttgaacctttctattgatagagcagttttgaaacactctttttgtggattctgcaagtggatatttggattgctttgaggatttcgttggaagcgggaattcgtataaaaactagacagcagcattcccagaaatttctttcggatatttccattcaactcatagagatgaacatggcctttcatattgaaacactctttttgtagtttgtggaagtggacatttcgatcgccttgacgcctgtggtgaaaaaggaaatatcttcccataaaaaatagacagaagcattctcagaaacttgttggtgatatgtgtcctcaactaacagagttgaactttgccattgatagagagcagttttgaaacactctttttgtggaatctgcaagtggatatttggatagcttggaggatttcgttggaagcgggaattcaaataaaaggtagacagcagcattctcaggaaatttctttctgatgtctgcattcaactcatagagttgaagattccctttcatagagcaggtttgaaacactctttctggagtatctggatgtggacatttggagcgctttgatgcctacggtggaaaagtaaatatcttcccataaaaacgagacagaaggattctgagaaacaagtttgtgatgtgtgtactcggctaacagagtggaacctctcttttgatgcagcagtttggaaacactctttttatagaaactgtaagtggatatttggatagctctaatgatttcgttggaaacgggaatatcatcatctaaaatctagacagaagccctctcagaaactactttgtgatatctgcattcaagtcacagagtttaacattcgctttcttagagcacgtttgaaacactctttttgtagtgtctggaagtggacatttggagcgctttgatgcctttggtgaaaaagggaatgtcttcccataaaaactagacagaagcattctcagaaacttgtttgtgatgtgtgtacccagccaaaggagttgaacatttctattgatagagcagttttgaaacactctttttgtggaaaatgcaggtggatatttggatagcttggaggatttcgttggaagcaggaattcaaataaaaggtagacagcagcattctcagaaatttctttctgatgtctgcattcaactcatagagttgaagattccctttcatagagcaggtttgaaacactcgttctggagtatctggatgtggacatttggagcgctttgatgcctacggtggaaaattatatatcttcccataaaaacgagacagaaggattctcagaaacaagtttgtgatgtgtgtactcagctaacagagtggatcctttctttttacagagcagctttgaaattctatttctgtggattctgcaaattgatatttgggttgatttaacgacatcgttggaaaagggaatatcttcatacaaaatctagacagaagtattctcacaaacttctttgtgatgtgtgtcctcaactaacagagttgaacctttcttttgatgcagcagtttggaaacacccttttggtagaaactgtaagtggatatttggatagctctaacgatttcgttggaaacgggaatatcatcatctaaaatctagacagaagcactattagaaactacttggtgatatctgcattcaagtcacagagttgaacattcccttacttcgagcacgtttgaaacactcttttggaagtatctggaagtggacatttggagcgctttgatgcctttggtgaaaaggaaacgtcttccaataaaagccagacagaagcattctcagaaacttgttcgtgatgtgtgtactcaactaaaagagttgaacctttctattgatagagcagttttgaaacactctttttgtggattctgcaagtggatatttggattgctttgaggatttctttggaagcgggaattcgtataaacactagacagcagcattcccagaaatttctttcggatatttccattcaactcatagagatgaacatggcctttcatagagcaggtttgaaacactctttttgtagtttgtggaagtggacatttcgatcgccttgacgcctacggtgaaaaaggaaatatcttcccataaaaaatagacagaagcattctcagaaacttgttggtgatatgtgtcctcaactaacagagttgaactttgccattgatagagagcagttttgaaacactctttttgtggaatctgcaagtggatatttggatagcttggaggatttcgttggaagcgggaattcaaataaaaggtagacagcagcattctcagaaatttctttctgatgtctgcattcaactcatagagttgaagattccctttcatagagcaggtttgaaacactctttctggagtatctggatgtggacatttggagcgctttgatgcctacgatgaaaaagtaaatatcttcccagaaaaacgagacagaaggattctgagaaacaagtttgtgatgtgtgtactcagataacagagtggaacctctcttttgatgcagcagtttggaaacactctttttgcagaaactgtaagtggatatttggatagctctaatgatttcgttggaaacgggaatatcatcatctaaaatctagacagaagcactctcagaaactactttgtgatatctgcattcaagtcacagagttgaacattcgctttcttagagcacgtttgaaacactctttttgtagtgtctggaagtggacatttggagcgctttgatggctttggtgaaaaagggaacgtcttcccataaaaactagacagaagcattctcagaaacttgtttgtgatgtgtgtacccagccaaaggagttgaacgtttctattgatagagcagttttgaaacactcttgttgtggaaaatgcaagtggatatttggatagtttggaggatttcgttggaagcgggaattcaaataaaaggtagacagcagcattctcagaaatttctttctgatgtctgcattcaactcatagagttgaagattccctttcatagagtaggtttgaaacactcgttctggagtatctggatgtggacatttggagagctttgatgcctacggtgaaaaagtaaatatcttcccataaaaacgagacagaaaggattctgagaaacaagtttgtgatgtgtgtactcagctaacagagtggaacctttctttttacagagcagctttgaaactctatttttgtggattctgcaaatggatatttagattgctttaacgatatcgttggaaaagggaatatcgtcatacaaaatctagacagagcattctcacaaacttctttgtgatgtgtgtcctcaactaacagagttgaacctttcttttgatgcagcaatttggaaacacccttttggtagaaactgtaactggatatttgcttagctctaacgattccgttggaaacgggaatatcatcatctaaaatctagacagaagcactattagaaactacttggtgatatctgcattcaagtgacagagttgaacattcccttactttgagcacgtttgaaacactcttttggaagaatctggaagtggacatttggagcgctttgatgcctttgttgaaaaggaaacgtcttccaataaaagccagacagaagcattctcagaaacttgttcgtgaagtgtgtactcaactaaaagagttgaacctttctattgatagagcagttttgaaacactctttttgtggattctgcaagtggatatttggattgctttgaggatttcgttggaagcgggaattcgtataaacactagacagcagcattcccagatatttctttcggatatttccattcaactcatagagatgaacatggcctttcatagagcaggtttgaaacactctttttgtagtttgtggcagtggacatttcgatctccttgacgcctacggtgaaaaaggaaatatcttcccataaaaaatagacagaagcattctcagaaacttgttggtgatatgtgtcctcaactaacagagttgaactttgccattgatagagagcagttttgaaacactctttttgtggaatctgcaagtggatatttggatagcttggaggatttcgttggaagcgggaattcaaataaaaggtagacagcagcattctcagaaatttctttctgatgtctgcattcaactcatagagttgaagattccctttcatagagcaggtttgaaacactcgttctggagtatctggatgtggacatttggagcgctttgatgcctacggtgcaaaagtaaatatcttcccataaaaacgagacagaaggattctgagaaacaagtttgtgatgtgtgtactcagctaacagagtggaacctctcttttgatgcagcagtttggaaacactctttttgtagaaagtgtaagtggatatttggatagctctaatgatttcgttggaaacgggaatatcatcatctaaaatctagacagaagcactctcagaaactactttgtgatatctgcattcaagtcacagagttgaacattcgctttcttagagcacgtttgaaacactctttttgtagtctctggaagtggacatttggagcgctttgatgcctttggtgaaaaagggaatgtcttcccataaaaactagacagaagcattctcagaaacttgtttgtgatgtgtgtacccagccaaaggagttgaacatttctattgatagagcagttttgaaacactcttgttgtggaaaatgcaagtggatattttgatagcttggaggatttcgttggaagcgggaattcaaataaaaggtagacagcagcattctcagaaattactttctgatgtctgcattcaactcatagagttgaagattccctttcatagagcaggtttgaaacactctttctgtagtatctggatgtggacttttggagcgctttgatacctacggtgaaaaagtaaatatcttcccataaaaagtagacagaaggatattcagaaacaagtttgtgatatgtgtactcagctaacagagtgtatcctttctttttacagagcagctttgagactctatttctgtggattctgcaaattgatatttgggttgatttaacgatatcgttggaaaagggaatatcttcatacaaaatctagacagataagcattctcacaaacttctttgtgatgtgtgtcctcaactaacagagttgaacctttcttttgatgcagcaatttggaagcacccttttggtagaaactgtaactggatatttggatagctctaacgatttcgttggaaacgggaatatcatcatctaaaatgtagacagaagcactattagaaactacttggtgatatttgcattcaagtcacagagttgaacattcccttacttcgaccacgtttgaaacactcttttggaagaatctggaagtggacatttggagcgctttgatgcctttggtgaaaaggaaacgtcttccaataaaagccagacagaagcattctcagaaacttgttcgtgatgtgtgtactcaactaaaagagttgaacctttctattgatagagcagttttgaaacactctttttgtggattctgcaagtggatatttggattgctttgaggatttcgttggaagcgggaattcgtataaacactagacagcagcattcccagaaatttctttcggatatttccattcaactcatagagatgaacatggcctttcatagagcaggtttgaaacactctttttgtagtttgtggaagtggacatttcgatcgcgttgacgcctacgctgaaaaaggaaatatcttcccataaaaaatagacagaagcattctcagaaacttgttggtgatatgtgtcctcaactaacagagttgaactttgccattgatagagagcagttttgaaacactctttttgtggaatctgcaagtggatatttggatagcttggaggatttcgttggaagcggtaattcaaataaaaggtagacagcagcattctcagaaatttctttctgatgtctgcattcaactcatagagttgaagattccctttcatagagcaggtttgaaacactctttctggagtatctggatgtggacatttgaagcgctttgatgcctacggtgagaaagtaaatatcttcccataaaaacgagacagaaggattctgagaagcaagtttgtgatgtgtgtactcagctaacagagtggaacctctcttttgatgcagcagtttggaaacactctttttgtagaaactgtaagtggatatttggatagctctaacgatttcgttggaaacgggaatatcatcatctaaaatctagacagaagccctctcagaaactactttgtgatatctgcattcaagtcacagagttgaacattcgctttcttagagcacgtttgaaacactctttttgtagtgtctggaagtggacatttggagcgctttgattcctttggtgaaaaagggaacgtcttcccataaaaactagacagaagctttctcagaaacttgtttgtgatgtgtgtacccagcgaaaggatttgaacatttctattgatagagcagttttgaaacactctttttgtggaatctgcaagtggatatttggatagcttggaggttttcgttggaagcgggaattcaaataaaaggtagacagcagcattctcagaaatttctttctgatgtctgcattcaactcatagtagttgaagattccctttcatagagcaggtttgaaacactctttctggagtatctggatgtggacatttggagcgctttgatgcctacggtgaaaaagtaaatatcttcccataaaaacgacacagaaggattctcagaaacaagtttgtgatgtgtgtactcagctaacagagtggaacctctcttttgatgcagcagtttggaaacactctttttgtagaaactgtaagtggatatttggatagctctaatgatttcgttggaaacgggaatatcatcatctaaaatctagacagaagcagtctcagaaactactttgtgatatctgcattccagtcacagagttgaaaactcccttacttagagcaggtttgaaacacactttttgtagaatctggaagtggatatttggagtgctttgatgcctttggtgaaaaaggaaatgtcttcccttaaaaagtagacagaagctttctcagaaacttgtatgtgatgtgtgtactcaactaaaagagttgaacctttctattgatagagcagttttgaaacactctttttgtggaatctgcaagtggatatttggattgctttgaggacttcgttggaagcgggaattcataaaaaagtagacagcagcattctcagaaatttctttctgatgtctgcattcaactcatagagttgaagattccctttcatagagcaggtttgaaacagtctttctggtgtatctggatgtggacatttggagcgctttgatgcctacggtgaaaaagtaaatatcttcccataaaaacgagacagaaggattctgagaaacaagtttgtgatgtgtgtactcagctaacagagtggaacctttctttttacagagcagctttgaaactctatttttgtggattctacaaattgatatttagattgctttaacgatatcgttggaaaagggaatatggtcatacaaaatctagacagaagcattctcacaaacttctttgtgatgtgtgtcctcaactaacagagttgaacctttcttttgatgcagcagtttggaaacactctttttgtagaaactgtaagtggatatttggatagctctaacgatttcgctggaaacgggaatatcgtcatctaaaatctagacagaagcactattagaaactacttggtgatatctgcattcaagtcaaagagttgaacattcccttactttgagcacgtttgaaacactcttttggaagaatctggaagtggacatttggagcgctttgatgcctttggtgaaaaggaaacgtcttccaataaaagccagacagaagcattctcagaaacttgtttgtgatgtgtgtactcaactaaaagagttgaacctttctattgatagagcagttttgaaacactctttttgtggattctgcaagtggatatttggattgctttgaggatttcgttggaagcgggaattcgtataacaactagacagcagcattcccagaaatttctttcggatatttccattcaactcatagagatgaacatggcctttcatagagcaggtttgaaacactctttttgtagtttgtggaagtggacatttcgatcgccttgacgcctacggtgaaaaaggaaatatcttcccataaaaaatagacagaagcattttcagaaactcgttggtgatatgtgtcctcaactaacagagttgaactttgccattgatagagagcagttttgaaacactctttttgtggaatctgcaagtggatattttgatagcttggaggatttcgttggaagcggaaattcaaataaaaggtagacagccagcattctcagaaatttctttctgatgtctgcattcaactcatagagttgaacattccctttcatagagcaggtttgaaatactctttctgtggtatctggatgtggacatttggagcgctttgaggcctacggtgaaaaagtaaatatcttcccataaaaacgagacagaggattctgagaaacaagtttgtgatgtgtgtactcagctaacagagtggaacctctcttttgatgcagcagtttggaaacactctttttgtagaaactgtaagtagatatttggatagctctaacgatttcgttggaaacgggaatatcatcatctaaaatctagacagaagccctctcagaaactactttgtgatatctgcattcaactcacagagttgaacattcggtttcttagagcacgtttgaaacactctttttgtagtgtctggaagtcgacatttggagcgctttgatgcctttggtgaaaaagggaatgtcttcccataaaaactagacagaagcattctcagaaacttgtttgtgatgtgtgtacccagaaaaaaggagttgaacatttctattgatagagcagttttgaaacactctttttgtggaaaatgcaggtggatatttggatagcttggaggatttcgttggaagcgggaattcaaataaaaggtagacagcagcattctcagaaatttctttctgatgtctgcattcaactcatagagttgaagattccctttcatagagcaggtttgaaaaactctttctggagtatctggatgtggacatttggagcgctttgatgcctacggtgaaaaagtaaatatcttcccataaaaacgagacagaaggattctcagaaacaagtttgtgatgtgtgtactcagctaactgagtggaacctttctttttacagagcagctttgaaactctatttttgtggattctgcaaatggatatttagattgctttaacgatatcgttggaaaagggaatatcgtcatacaaaatctggacagaagcattctcacaaacttctttgtgatgtgtgtcctcaactatcagagttgaacctttcttttgatgcagcggtttggaaacactctttttgtagaaactgtaagtggatatttggatagctctaatgatttcgttggaaacgggaatatcatcatctaaaatctagacagaagcactattagaaactacttggtgatacctgcattcaagtcacagagttgaacattcccttacttcgaccacgtttgaaacactcttttggaagaatctggaagtggacatttggagcgctttgatgcctttggtgaaaaggaaacgtcttccaataaaagccagacagaagcattctcagaaacttgtttgtgatgtgtgtactcaattaaaagagttgaacctttctattaatagtgtagttttgaaacactctttttgtggattctgcaagtggatatttggattgctttgaggatttcgttggaagcgggaattcgtataaaaactagacagcagcattcccagaaatttctttcggatatttccattcaactcatagagatgaacatggcctttcatagagcaggtttgaaacactctttttgtagtttgtggaagtggacatttcgatcgccttgacgcctacgctgaaaaaggaaatatcttcccataaaaaatagacagaagcattctcagaaacttgttggtgatatgtgtcctcaactaacagagttgaactttgccattgatagagagcagttttgaaacactctttttgtggaatctgcgagtggatatttggatagtttggaggatttcgttggaagcgggaattcaaataaaaggtagacagcagcattctcagaaatttctttctgatgtttgcattcaactcatagagttgaacattccctttaatagagcaggtttgaaacactctttctgtactatctggatgtggacatttggagcgctttgacgcctacggtgaaaaaggaaatgtcttcccataaaaaattgaagaaggattctgagaaacaagtttgtgatgtgtgtactcagctaagagtgtggaacctctcttttgatgcagcagtttggaaacactctttttgtagaaactataagtggatatttggatagctgtaatgatttcgttggaaacgggaatatcatcatctaaaatctagacagaagccctctcagaaactactttgtgatatctgcattcaagtcacagagttgaacattcgctttcttagagcacgtttgaaacactctttttgtagtgtctggaagtggacatttggagcgctttgatgcctttggtgaaaaagtgaatgtcttcccataaaaactagacagaagcattctcagaaacttgtttgtgatgtgtgtacccagccaaaggagttgaacatttctattgatagagcagttttgaaacactctttttgtggaaaatgcaagtggatatttggatagcttggaggatatcgttggaagcgggaattcaaataaaaggtagacagcagcattctcagaaatttctttctgatgtctgcattcaactcgtagagttgaagattccctttcatagagcaggtttgaaacactctttctggagtatctggatgtggacatttggagcgctttgatgcctacggtgaaaaagtaaatatcttcccataaaaacgagacagaaggattctcagaaacaagtttttgatgtgtgtactcagccaaaagagtggaacctttctttttacagagcagctttgaaactgtatttttgtggattctgcaaatttatatttagattgttttaacgatatcgttggaaaagggaatatcgtcatacaaaatctagacagaagcattctcacaaacttctttgtgatgtgggtcctcaactaacagagttgaacctttcttttgatgcagcaatttggaaacacccttttggtagaaactgtaactggatatttggatagctctaacgatttcgttggaaacgggaatatgatcatctaaaatctagacagaaagcactattagaaactacttggtgatatctgcattcaagtcacagagttgaacattcccttactttgagcacgtttgaaacactcttttggaagaatctggaagtggacatttggagcgctttgatgcctttggtgaaaaggaaacgtcttccaataaaagccagacagaagcattctcagaaacttgtttgtgatgtgtgtactcaactaaaagagttgaacctttctattgatagagcagttttgaaacactctttttgtggattctgcaagtggatatttggattgctttgaggatttcgttggaagcgggaattcgtataaaaactagacagcagcattcccagaaatttctttcggatatttccattcgactcatagagatgaacatggcctttcatagagcaggtttgaaacactctttttgtagtttgtggaagtggacattttgatcgccttgacgcctacggtgaaaaaggaaatatcttcccataaaaaatagacagaagcattctcagaaacttgttggtgatatgtgtcctcaactaacagagttgaactttgccattgatagagagcagttttaaaacactctttgtgtggaatctgcaagtggatatttggatagcttggaggatttcgttggaagcgggaattcaaataaaaggtagacagcagcattctcagaaatatctttctgatgtctgcattcaactcatagagttgaagattccctttcatagagcaggtttgaaacactctttctggagtatctggatgtggacatttggagcgctttgatgcctacggtgaaaaagtaaatatcttcccataaaaaggagacagaaggattctgagaaacaagtttgtgatgtgtgtactcagctaacagagtggaacctctcttttgatgcagcagtttggaaacactctttttgtagaaactgtaagtggatatttggatagctctaatcatttcgttggaaacgggaatatcatcatctaaaatctagacagaagcactctcagaaactactttgtgatatgtgcattcaagtcacagagttgaacattcgctttcttagagcacgttggaaacactctttttgtagtgtctggaagtggacatttggagcgctttgatgcctttggtgaaaaagggaacgtcttcccataaaaactagacagaagcattctcagaaacttgtttgtgatgtgtgtacccagccaaaggagttgaacatttctattgatagagcagttttgaaacactcgttttgtggaaaatgcaggtggatatttggatagcttggaggatttcgttggaagcgggaattcaaataaaaggtagacagcagcattctcagaaattactttctgatgtctgcattcaactcatagagttgaagattccctttcatagagcaggtttgaaacactctttctgtagtatctggatgtggacatttggagcgctttgatatctacggtgaaaaagtaaatatcttcccataaaaactagacagaaggattctcagaaacaagtttgtgatgtgtgtactcagctaacagagtggaacctttctttttacagagcagctttcaaactctatttttgtggattctgcaaattgatatttagattgctttaacgatatcgttggaaaagggaatattgtcatacaaaatctggacagaagctttctcagaaacttcgttgtgatgtgtgtcctcaagtaacagagttgaacctttctttagatgcagcagtttggaaacactctttttgtagaaactgtaagtggatatttgggtaggtctaacgatatcgttggaaacgggaatatcttcatctaaagtatacacagaagcactattagaaactacttggtgatatctgcattaaagtcaaagagttgaacattcccttactttgagcacgtttgaaacactcttttggaagaatctggaagtggacatttggagcgctttgatgcctttggtgaaaaggaaacgtcttccaataaaagccagacagaagcattctcagaaacttgtttgtgatgtgtgtactcaactaaaagagttgaacctttctattgatagagcagttttgaaacactctttttgtggattctgcaagtggatatttggattgctttgaggatttcgttggaagcgggaattcgtataaaaactagacagcagcattcccagaaatttctttcggatatttccattcgactcatagaaatgaacatggcctttcatagagcaagtttgaaacactctttttgtagtttgtggaagtggacatttcgatcgccttgacgcctacggtgaaaaaggaaatatcttcccataaaaaatagacagaagcattctcagaaacttgttggtgatatgtgtcctcaactaacagagttgaactttgccattgatagagagcagttttgaaacactctttttgtggaatctgcaagtggatatttggatagcttggaggatttcgttggaagcgggaattcaaataaaaggtagacagcagcattctgagaaatttctttctgatgtctgcattcaactcatagagttgaagattccctttcatagagcaggtttgaaacactctttctgtagtatctggatgtggacatttggagcgctttgatgcctacggtgaaaaagtataatcttcccataaaaacgagacagaaggattctcagaaacaagtttgtgatgtgtgtactcagctaacagagtggaacctctcttttgatgcagcagtttggaaacactctttttgtagaaactgtaagtggatatttggatagctctaatgatttcgttggaaacgggaatatcatctaaaatcgagacagaagcagtctcagaaactactttgtgatatctgcattccagtcacatagttgaaaactctcttacttagagcaggtttgaaacactctttttgtagaatctggaagtggacatttggagcgctttgatgcctttggtgaaaaaggaaatgtcttcccttaaaaagtagacagaagcattctcagaaacttgtttgtgatgtgtgcacccagctaaaggagttgaacatttctattgatagagcagttttgaagcactctttttgtggaaaatgcaagtggatatttggatagcttggaggatttcgttggaagcgggagttcaaataaaaggtagacagcagcattctcagaaatttctttctgatgtctgcattcaactcatagagttgaagattccctttcatagagcaggtttgaaacactctttctggagtatctgtatgtggacatttggagcgctttgatgcctacggtgaaaaagtaaatatcttcccataaaaacgagacagaaggattctcagaaacaagtttgtgatgtgtgtactcagctaacagagtggaacctttctttttacagagcagctttgaaactctattgttgtggattctgcaaattgatatttagattgctttaacgatatcgttggaaaagggaataccgtcatacaaaatctagacagaagcattctcacaaacttctttgtgatgtgtgtcctcaactaacagagttgaacctttcttttgatgcagcaatttggaagcacccttttgatagaaactgtaactggatatttggatagctctaacgatttcgttggaaacgggaatatcatcatctaaaatctagacagaagcactattagaaactacttggtgatatctgcattcaagtcacagagttgaacattcccttacttcgagcacgtttgaaacactcttttggaagaatctggaagtggacatttggagcgctttgatgcctttggtgaaaaggaaacgtcttccaataaaagccagacagaagcattctcagaaacttgtttgtgatgtgtgtactcaactaaaagagttgaacctttctattgatagagcagttttgaaacactctttttgtggattctgcaagtggatatttggattgcgttgaggatttcgttggaagcgggaattcgtataaaaactagacagcagcattcccagaaatttctttcggatatttccattcaactcatagagatgaacatggcctttcatagagcaggtttgaaacactctttttgtagtttgtggaagtggacatttcgatcgccttgacgcctacgctgaaaaaggaaatatcttcccataaaaaatagacagaagcattctcagaaacttgttggtgatatgtgtcctcaactaacagagttgaactttgccattgatagagagcagttttgaaacactctttttgtggaatctgcaagtggatatttggatagcttggaggatttcgttggaagcgggaattcaaataaaagatagacagcagcattctcagaaatttctttctgatgtctgcattcaactcatagagttgaagattccctttcatagagcaggtttgaaacactctttctggagtatctggatgtggacatttggagcgctttgatgcctacggtggaaaagtaaatatcttcccataaaaacgagacagaaggattctgagaaacaagtttgtgatgtgtgtactcggctaacagagtggaacctctcttttgatgcagcagtttggaaacactctttttgtagaaactgtaagtggatatttggatagctctaatgatttctttggaaacgggaatatcatcatctaaaatctagacagaagcactctcagaaactactttgtgatatctgcattcaagtcacagagttgaacattcgctttcttagagcacgtttgaaacactctttttgtagtgtctggaagtggacatttggagcgctttgatgcctttggtgaaaaagggaacgtcttcccataaaaactagacagaagcattctcagaaacttgtttgtgatgtgtgtacccagccaaaggagttgaacatttctattgatagagcagttttggaacactcttgttgtggaaaatgcaggtggatatttggatagcttggaggatttcgttggaagcgggaattcaaataaaaggtagacagcagcattctcagaaatttctttctgatgtctgcattcaactcatagagttgaagattccctttcatagagcaggtttgaaacactcgttctggggtatctggatgtggacatttggagcgctttgatgcctacggtggaaaagtaaatatcttcccataaaaacgagacagaaggattctcagaaacaagtttgtgatgtgtgtactcagctaacagagtggaacctttatttttacagagcagctttgaaactctatttttgtggattctgcaaattgatatttagattgctttaacgatattgttggaaaagggaatatcgtcatacaaaatctagacagaagcattctcacaaacttctttgtgatgtgtgtcctcaactaacagagttgaacctttcttttgatgcagcaatttggaaacacccttttggtagaaactgtaactggatatttgcttagctctaacgatttcgttggaaacgggaatatcatcatctgaaatctagacagaagcactattagaaactacttggtgatatctgcattcaagtcacagagttgaacattcccttactttgagcacgtttgaaacactcttttggaagaatctggaagtggacatttggagcgctttgatgcctttggtgaaaaggaaacgtcttccaataaaagccagacagaagcattctcagaaacttgttcgtgatgtgtgtactcaactaaaagagttgaacctttctattgatagagcagttttgaaacactctttttgtggattctgcaagtggatatttggattgctttgaggatttcgttggaagcgggaattcgtataaacactagacaacagcattcccagaaatttctttcggatatttccattcaactcatagagatgaacatggcctttcatagagcaggtttgaaacactctttttgtagtttgtggaagtggacatttcgatcgccttgacgcctacggtgaaaaaggaaatatcttcccataaaaaatagacagaagcattctcagaaacttgttggtgatatgtgtcctcaactaacagagttgaactttgccattgatagagagcagttttgaaacactctttttgtggaatctgcaagtggatatttggatagcttggaggatttcgtaggaagcgggaattcaaataaaaggtagacagcagcattctcagaaatttctttctgatgtctgcattcaactcatagagttgaagatttcctttcatagagcaggtttgaaacactctttctggagtatctggatgtggacatttggagcgctttgatgcctacggtgaaaaagtaaatatcttcccataaaaacgagacagaaggattctcagaaacaagtttgtgatgtgtgtactcagctaacagagtggaacctctcttttgatgcagcagtttggaaacactctttttgtaaaaactgtaagtggatatttggatagctctaatgatttcgttggaaacgggaatatcatcatctaaaatctagacagaagccctctcagaaactactttgtgatatctgcattcaagtcacagagttgaacattcgctttcttagagcacgtttgaaacactctttttgtagtgtctggaagtggacatttggagcgctttgatgtctttggtgaaaaagggaatgtcttcccataaaaactagacagaagcattctcagaaacttgtttgtgatgtgtgtacccagccaaaggagttgaacatttctattgatagagcagttttgaaacactcttgttgtggaaaatgcaggtggatatttgaatagcttggaggatttcgttggaagcgggaattcaaataaaaggtagacagcagcattctcagaaatttctttctgatgtctgcattcaactcatagagttgaagattccctttcatagagcaggtttgaaacactctttctggagtatctggatgtggacatttcgagcgctttgatgcctacggtgaaaaagtaaatatcttcccataaaaacgagacagagaaggattctgagaaacaagtttgtgatgtgtgtactcagctaacagagtggaacctttctttttacagagcagctttgaaactctatttttgtggattctgcaaatggatatttagattgctttaacgatatcgttggaaaagggaatatcgtcatacaaaatctagacagaagctttctcagaaacttctttgtgatgtgtgtcctcaactcacagatttgaacctttctttagatgcagcactttggaaacactctttttgtagaaactgtaagtggatatttgggtaggtctaacgatatcgttggaaacgggaatatcttcatctgaagtatacacagaagcactattagaaactacttggtgatatctgcattcaagtcacagagttgaacattcccttactttgagcacgtttcaaacactcttttggaagaatctggaagtggacatttggagcgctttgatgcctttggtgaaaaggaaacgtcttcccataaaagccagacagaagcattctcagaaacttgtttgtgatgtgtgtactcaactaaaagagttgaacctttctattgatagagcagttttgaaacactctttttgtggattctgcaagtggatatttggattgctttgaggatttcgttggaagcgggaattcgtataaaaactagacagcagcattcccagaaatttctttcggatatttccattcgactcacagagatgaacatggcctttcatagagcaggtttgaaacactctttttgtagtttgtggaagtggacatttcgatcgccttgacgcctacggtgaaaaaggaaatatcttcccataaaaaatagacagaagcattctcagaaacttgttggtgatatgtgtcctcaactaacagagttgaactttgccattgatagagagcagttttgaaacactctttttgtggaatctgcaagtggatatttggatagcttggaggatttcgttggaagcgggaattcaaataaaaggtagacagcaggattctgagaaacaaatttgtgatgtgtgtactcagctaacagagtggaacctctcttttgatgcagcagtttggaaacactctttttgtagaaactgtaagtggatatttggaagccctaatgattttgttggaaacgggattatcatcatctaaaatctagacagaagccctctcagaaactactttgtgatatctgcattcaagtcacagagttgaacattcactttcttagagcacgttggaaacactctttttgtagtgtctggaagtggacatttggagtgctttgatgcctttggtgaaaaagggaatgtcttcccataaaaactagacagaagcattctcagaaacttgtttgtgatgtgtgtacccagacaaaggagttgaacatttctattgatagagcagttttgaaacactcttgttgtggaaaatgcaggtggatatttggatagcttggaggatttcgttggaagcgggaattcaaataaaaggtagacagcagtattctcagaaatttctttctgatgtctgcattcaactcatagagttgaagattccctttcatagagcaggtttgaaacactctttctggagtatctggatgtggacatttggagcgctttgatgcctacggtgaaaaagtaaatatcttcccataaaaacgagacagaaggattctgagagacaagtttgtgatgtgtgtactcagctaacagagtggaacctttctttttacagagcagctttgaaactctatttttgtggattctgcaaatggatatttagattgctttaacgatatcgttggaaaagggaatatcgtcatacaaaaacggacagaagcattctcacaaacttctttgtgacgtgtgtcctcaactaacagagttgaacctttcttttgatgcagcagtttggaaacactgtttttgtagcaactgtaagtggatatttggatagctctaacgatttcgttggaaacgggaatatcatcatctaaattctagacagaagcactattagaaactacttggtgatatctgcattcaagtcacagagttgaacattcccttactttgagcacgtttcaaacactcttttagaagaatctggaagtggacatttggagcgctttgatgcctttggtgaaaaggaaacgtcttccaataaaagccagacagaagcattctcagaaacttgtttgtgatgtgtgtactcaactaaaagagttgaacctttctattgatagagcagttttgaaacactctttttgtggattctgcaagtggatatttggattgctttgaggatttcgttggaagcgggaattcgtataaaaactagacagcagcattcccagaaatttctttcggatatttccattcgactcatagagatgaacatggcctttcatagagcaggtttgaaacactctttttgtagtttgtggaagtggacatttcgatcgccttgacgcctacggtgaaaaaggaaatgtcttcccataaaaaattgaagaagcattctcagaaacttgttggtgatatgtgtcctcaactaacagagttgaactttgccattgatagagagcagttttgaaacactctttttgtggaatctgcaagtggatatttggatagcttggaggatttcgttggaagcgggaattcaaataaaaggtagacagcagcattctcagaaatttctttctgatgtctgcattcaactcatagagttgaagattccctttcatagagcaggtttgaaacactctttctggagtttctggatgtggacatttggagcgctttgatgcctacggtgaaaaagtaaatatcttcccagaaaaacgagacagagaaggattctgagaaacaagtttgtgatgtgtgtactcagctaacagagtggaacctttctttttacagagcagctttgaaactctatttttgtggattctgcaaatggatatttagattgctttaatgatatcgctggaaaagggaatatggtcatacaaaatctagacagaagcattctcacaaacttctttgtgatgtgtgtcctcaactaacagagttgaacctttcttttgatgcagcagtttggaaacactgtttttgtagcaactgtaagtggatatttggatagctctaacgatttcgttggaaacgggaatatcatcatctaaaatctagacagaagcactattagaaactacttggtgatatctgcattcaagtcacagagttgaacattcccttactttgagcacgtttcaaacactcttttggaagaatctggaagtggacatttggagcgctttgatgcctttggtgaaaaggaaacgtcttccaaaaaaagccagacagaagcattctcagaaacttgttcgtgatgtgtgtactcaactaaaagagttgaacctttctattgatagtgcagttttgaaacactctttttgtgaattctgcaagtggatatttggattgctttgaggatttcgttggaagcgggaattcgtataaacactagacagcagcattcccagaaatttctttcggatatttccattcgactcatagagatgaacatggcctttcatagagcaggtttgaaacactctttttgtagtttgtggaagtggacatttcgatcgccttgacgcctacggtgaaaaaggaaatatcttcccataaaaaatagacagaagcattctcagaaacttgttggtgatatgtgtcctcaactaacagagttgaactttgccattgacagagagcagttttgaaacactctttttgtggaatctgcaagtggatatttggatagcttggaggatttcgttggaagcgggaattcaaataaaaggtagacagcagcattctcagaaatttctttctgatgtctgcattcaactcatagagttgaagattccctttcatagagcacgtttgaaacactctttctggagtatctggatgtggacatttggagcgctttgatgcctacggtgaaaaagtaaatatcttcccataaaaacgagacagaaggattctgagaaacaagtttgtgatgtgtgtactcagctaacagactggaacctctcttttgatgcagcagtttggaaacactctttttgtagaaactgtaagtggatatttggatagctctaatgattccgttggaaacgggaatatcatcatctaaaatctagacagaagccctctcagaaactactttgtgatatctgcattcaagtcacagagttgaacattcgctttcttagagcacgtttgaaacactctttttgtagtgtctggaagtggagatttggagcgctttgatgcctttggtgaaaaagggaacgtcttcccataaaaactagacagaagcattctcagaaacttgtttgtgatgtgtgtacccagccaaaggagttgaacatttctattgatagagcagttttgaaacactcttgttgtggaaaatgcaagtggatatttggatagcttggaggatttcgttggaagcgggaattcaaataaaaggtagacagcagcattctcagaaatttctttctgatgtctgcattcaactcatagagttgaagattccctttcatagagtaggtttgaaacactcgttctggagtatctggatgtggacatttggagcgctttgatgcctacggtggaaaagtaaatatcttcccataaaaacgagacagaaaggattctgagaaacaagtttgtgatgtgtgtactcagctaacagaagtggaacctttctttttacagagcagctttgaaactctatttttgtggattctgcaaattgatatttagattgctttaacgatatcgttggaaaagggaatatcgtcatacaaaacctagacagaagcattctcacaaacttctttgtgatgtgtgtcctcaactaacagagttgaacctttcttttgatgcagcaatttggaaacacccttttggtagaaactgtaactggatatttggatagctctaacgatttcgttggaaacgggaatatcatcatctaaaatgtaggcagaagcactattagaaactacttggtgatatctgcattcaagtcacagagttgaacattcccttacttggagcacgtttgaaacactcttttggaagaatctggaagtggacatttggagcgctttgatgcctttggtgaaaaggaaacgtcttccaataaaagccagacagaagcattctgagaaacttgttcgtgatgtgtgtactcaactaaaagagttgaacctttctattgatagagcagttttgaaacactctttttgtggattctgcaagtggatatttggattgctttgaggatttcgttggaagcgggaattcgtataaacactagacagcagcattcccagaaatttctttcggatatttccattcaactcatagagatgaacatggcctttcatagagcaggtttgaaacactctttttgtagtttgtggaagtggacatttcgatcgccttgacgcctacggtgaaaaaggaaatatcttcccataaaaaatagacagaagcattctcagaaacttgttggtgatatgtgtcctcaactaacagagttgaactttgccattgatagagagcagttttgaaacactctttttgtggaatctgcaagtggatatttggatagcttggaggatttcgttggaagcgggaattcaaataaaagacagcagcattctcagaaatttctttctgatgtctgcattcaactcatagagttgaacattccctttcatagagcaggtttgaaacactctttctggagtatctggatgtggacatttggagcgcttttatgcctacggtgaaaaagtaaatatcttcccataaaaacgagacagaaggattctgagaaacaagtttgtgatgtgtgtactcagctaacagagtggaacctctcttttgatgcagcagtttggaaacactctttttgtagaaactgtaagtggatatttggatagctctaatgatttctttggaaacggtaatatcatcatctaaaatctagacagaagccctctcagaaactactttgtgatatctgcattgaagtcacagagttgaacattcgctttcttagagcacgttggaaacactctttttgtagtgtctggaagtggacatttggagcgctttgatgcctttggtgaaaaagggaatgtcttcccataaaaactagacagaagcattctcagaaacttgtttgtgatgtgtgtacccagctaaaggagttgaacatttctattgatagagcagtttcgaaacactctttttgtggaaaatgcaggtggatatttggatagcttggaggatttcgttggaagcgggaattcaaataaaaggtagacagcagcattctcagaaatttctttctgatgtctgcattcaactcatagagttgaacattccctttcatagagcaggtttgaaacactctttctggagtatctggatgtggacatttggagcgctttgattcctacggtgaaaaagtaaatatcttcccataaaaacgagacagaaggattctgagagacaagtttgtgatgtgtgtactcagctaacagagtggaacctttctttttacagagcagctttgaaactctatttttgtggattctgcaaatggatatttagattgctttaatgatatcgttggaaaagggaatatcgtcatacaaaatctggacagaagcattctcacaaacttctttgtgatgtgtgtcctcaactaacagagttgaacctttcttttgatgcagcagtttggaaacactctttttgtagaaactgtaagtggataattggatagctgtaacgatttcgttggaaacgggaatatcgtcatctaaaatttagacagaagcactattagaaactacttggtgatatctgcattcaagtcaaagagttgaacattcccttactttgagcacgtttgaaacactcttttggaagaatctggaagtggacatttggagcgctttgatgcctttggtgaaaaggaaacgtcttccaataaaagccagacagaagcattctcagaaacttgttcttgacgtgtgtactcaactaaaagagttgaacctttctattgatagagcagttttgaaacactctttttgtggattctgcaagtggatatttggattgctttgaggatttcgttggaagcgggaattcgtataacaactagacagcagcattcccagaaatttctttcggatatttccattcgactcatagagatgaacatggcctttcatagagcaggtttgaaacactctttttgtagtttgtggaagtggacatttcgatcgccttgacgcctacggcgaaaaaggaaatatcttcccataaaaaatagacagaagaattctcagaaacttgtttgtgatgtgaatcctcaactgacagaggtgaaccttgccattgatagagcagtttagaaacactctttttgtggaatctgcatgtggatatttggatagcctggaggatttcgttggaagcgggaattcaaatgaaaggtagacagcagcattctcagaaatttctttgtgatgtttgcattcaactcatagagttgaacattccctttcatagagcaggtttgaaacactctttctgtactatctggatgtggacattgggaacgctttgatgcctatggtgaaaaagaaaatatcttcccataaaagctagacagaaggattctcagaaacatgtttgtgatgtgtgtcctcagctaacagagtggaacctctcttttgatgcagcactttggaaactctctttttgtagaaactgtaagtggatatttggatagctctaatgatttcattggaaacgggaatatcatcatctaaaatctagacagaagccctctcagaaactactttgtgatatctgcattcaagtcacagagttgaacattcgctttcttagagcacgtttgaaacactctttttgtagtgtctgaaagtggacctttggagcgctctgatgcctttggtgaaaaagggaatgtcttcccataaaaactagacagaagcattctcaggaaacttgtttgtgatgtgtgtacccagctaatggagttgaacatttctattgatagagcagttttgaaacactctttttgtggaaaatgcaagtggatatttggatagcttggaggatttcgttggaagcgggaattcaaataaaaggtagacagcagcattctcagaaatttctttctgatgtctgcattcaactcatagagttgaagattccctttcattgagtaggtttgaaacactcgttctggagtatatggatgtggacatttggagcgctttgatgcctacggtggaaaagtaaatatcttcccataaaaacgagacagaaggtattctgagcaaacaagtttgtgatgtgtgtactcagctaacagagtggaacctttctttttacagagcagctttgaaactctatttttgtggattctgcaaatggatatttagattgctttaatgatatcgctggaaaagggaatatggtcatacaaaatctagacagaagcattctcacaaacttctttgtgatgtgtgtcctcaactaacagagttgaacctttcttttgatgcagcaatttggaaacacccttttggtagaaactgtaactggatatttggatagctctaacgatttccttggaaacgggaatatcatcatctaaaatctagacagaagcactattagaaactacttggtgatatctgcattcaagtcacagagttgaacattcccttactttgagcacgtttgaaacactcttttggaagaatctggaagtggacatttggagcgctttgatgcctttggtgaaaaggaaacgtcttccaataaaagccagacagaagcattctcagaaacttgttggtgatgtgtgtactcaactaaaagagttgaacctttctattgatagagcagttttgaaacactctttttgtggattctgcaagtggatatttggattgctttgaggatttcgttggaagcgggaattcgtataaacactagacagcagcattcccagaaatttctttcggatatttccattcaactcatagagatgaacatggcctttcatagagcaggtttgaaacactctttttgtagtttgtggaagtggacatttcgatcgccttgacgcctacggtgaaaaaggaaatatcttcccatgaaaaatagacagaagcattctcagaaacttgttggtgatatgtgtcctcaactaacagagttgaactttgccattgatagagagcagttttgaaacactctttttgtggaatctgcaagtggatatttggatagcttggaggatttcgttggaagcgggaattcaaataaaaggtagacagcagcattctcagaaatttctttctgatgtctgcattcaactcatagagttgaagattccctttcatagagcaggtttgaaacactctttctggagtatctggatgtggacatttggagcgctttgatgcctacggtgaaaaagtataatcttcccataaaaacgagacagaaggattctgagaaaaaagtttgtgatgtgtgtactcagctaacagagtggaacctctcttttgatgcagcagtttggaaacactctttttgtagaaactgtaagtggatatttggatagctgtaatgatttcgttggaaacgggaatatcatcatctaaaatctagacagaagccctctcagaaactactttgtgatatctgcattcaagtcacagagttgaacattcggtttcttagagcacgtttgaaacactctttttgtagtgtctggaagtggacatttggagcgctttgatgcctttggtgaaaaagggaatgtcttcccataaaaactagacagaagcattctcagaaacttgtttgtgatgtgtgtacccagctaatggagttgaacatttctattgatagagcagttttgaaacactctttttgtggaaaatgcaagtggatatttggatagcttggaggatttcgttggaagcgggaattcaaataaaaggtagacagcagcattctcagaaatttctttctgatgtctgcattcaactcatagagttgaagattccctttcatagagcaggtttgaaacactctttctggagtatctggatgtgtacatttggagcgctttgatgcctacggtgaaaaagtaaatatcttcccagaaaaacgagacagaaggattctgagaaacaagtttgtgatgtgtgtactcagctaacagagtggaacctttctttttacagagcagctttgaaactctatttttgtggattctgcaaattgatatttagattgctttaacgatatcgttggaaaagggaatattgtcatacaaaatctggacagaagcattctcacaaacttctttgtgacgtgtgtcctcaactaacagagttgaacctttcttttgatgcagcagtttggaaacactctttttgtagaaactgtaagtggatatttggatagctctaacgatttcgttggaaacgggaatatcatcatctaaaatgctagacagaagcactattagaaactactttgtgatatctgcattcaagtcacagagttgaagattcgctttcttagagcacgttggaaacactctttttgtagtgtctggaagtggacatttggagcgctttgatgcctttggtgaaaaagggaatgtcttcccataaaaactagacagaaagcattctcagcaaacttgtttgtgatgtgtgtacccagccaaaggagttgaacatttctattgatagagcagttttgaaacgctctttttgtggaaaatgcaggtggatatttggatagcttggaggatttcgttggaagcgggaattcaaataaaaggtagacagcagcattcccagaaatttctttcggatatttccattcaactcatagagatgaacatggcctttcatattgaaacactctttttgtagtttgtggaagtggacatttcgatcgccttgacgcctacggtgaaaaaggaaatatcttcccatgaaaaatagacagaagcattctcagaaacttgttggtgatatgtgtcctcaactaacagagttgaactttgccattgatagagagcagttttgaaacactctttttgtggaatctgcaagtggatatttggatagcttggaggatttcgttggaagcgggaattcaaataaaaggtagacagcagcattctcagaaatttctttctgatgtctgcattcaactcatagagttgaagattccctttcatagagcaggtttgaaacactctttctggagtatctggatgtggacatttggagcgctttgatacctatggtgaaaaagtaaatatcttcccataaaaacgagacagaaggattctgagaaactagtttgtgatgtgtgtactcagctaacagagtggaacctctgttttgatgcagcagtttggaaacactctttttgtagaaactgtaagtggatatttggatagctctgatgatttcgttggaaacgggaatatcatcatctaaaatctagacagaagcactctcagaaactactttttgatatctgcattcaagtcacagagttgaacattcggtttcttagagcacttttgaaacactctttttgtagtatctggaagtggacatttggagctctttgatgcctttggtgaaaaaggaaatgtcttcccataaaaactagacagaagcattctcagaaacttgtttgtgatgtgtgcacccagctaaaggagttgaacatttattgatagagcagttttgaagcactctttttgtggaaaatgcaagtggatatttggatagtttggaggatttcgttggaagcgggagttcaaataaaaggtagacagcagcattctcagaaatttctttgtgatgtttgcattcaactcatagagttgaacattccctttcatagagcaggcttgaaacactctttctgcactatctggatgtggacatttggaacgctttgatgcctacggtgaaaaagtaaatatcttcccataaaaacgagacagaaggattctgagaaacaagtttgtgatgtgtgtactcagctaacagagtggaacctctcttttgatgcagcagtttggaaacactctttttgtagaaactgtaagtggatatttggatagctctaatgatttcgttggaaacgggaatatcatcatctaaagtctagacagaagccctctcagaaactactttgtgatatctgcattcaagtcacagagttgaacattcgctttcttagagcacgtttgaaacactctttttgtagtgtctggaagtggacatttggagcgctttgattcctttggtgaaaaagggaatgtctacccataaaaactacacagaagcattctcagaaacttgtttgtgatgtgtgtacccagccaaagggagttgaacatttctattgatagagcagttttgaaacactcttgttgtggaaaatgcaagtggatatttggatagcttggaggatttcgttggaagcgggaattcaaataaaaggtagacagcagcattctcagaaatttctttctgatgtctgcattcaactgatagagttgaagattccctttcatagagcaggtttgaaacactcgttctggagtatctggatgtggacatttggagcgctttgatgcctacggtggaaaagtaaatatcttcccataaaaacgagacagaaggattctgagaaacaagtttgtgatgtgtgtactcagctaacagagtggaacctttcttttcacagagcagctttgaaactctatttttgtggattctgcaaattgatatttagattgctttaacgatatcgttggaaaagggaatatcgtcatacaaaatctagacagaagcattctcacaaacttctttgtgatgtgtgtcctcaactaacagagttgaacctttcttttgatgcagcaatttggaaacacccttttggtagaaactgtaactgcatatttggatagctctaatgatttcgttggaaacgggaatatcatcatctaaaatctagacagaagcactattagaaactacttggtgatatctgcattcaagtcacagagttgaacattcccttacttcgagcacgtttgaaacactcttttggaagaatctggaagtggacatttggagccttttgatgcctttggtgaaaaggaaacgtcttccaataaaagccagacagaagcattctcagaaacttgttcgtgatgtgtgtactcaactaaaagagttgaacctttctattgatagagcagttttgaaacactctttttgtggattctgcaagtggatatttggattgctttgaggatttcgttggaagcgggaattcgtataaacactagacagcagcattcccagaaatttctttcggatatttccattcaactcatagagatgaacatggcctttaatagagcaggtttgaaacactctttttgtagtttgtggaagtggacatttcgatcgccttgacgcctacggtgaaaaaggaaatatcttcccataaaaaatagacagaagcattctcagaaacttgttggtgatatgtgtcctcaactaacagagttgaactttgccattgatagagagcagttttgaaacactctttttgtggaaaatgcaagtggatatttggatagcttggaggatttcgttggaagtgagaattcaaataaaaggtagacagcagcattctcagaaatttctttctgatgtctgcattcaactcatagagttgaagattccctttcatagagcaggtttgaaacactctttctggggtatctggatgtggacatttggagcgctttgatgcctacggtgaaaaagtaaatatcttcccataaaaacgagacagaaggattctgagaaacaagtttgtgatgtgtgtactcagctaacagagtggaacctctcttttgatgcagcagtttggaaacactctttttgtagaaactgtaagtggatatttggatagctctaatgatttcgttggaaacgggaatatcatcatttaaagtctagacagaagccctctcagaaactactttgtgatatctgcattcaagtcacagagttgaacattcgctttcttagagcacgtttgaaacactctttttgtagtgtctggaagtggacatttggagcgctttgattccttttgtgaaaaagggaatgtctacccataaaaactagacagaagcattctcagaaacttgtttgtgatgtgtgtacccagctaaaggatttgaacatttctattgatagagcagttttgaaacactcttttggtggaaaatgcaagtggatatttggatagcttggaggatttcgttggaagcgggaattcaaataaaaggtagacagcagcattctcagaaatttctttctgatgtctgcattcaactcatagagttgaagattccctttcatagagcaggtttgaaacagtctttctggagtatctggatgtggacatttggagcgatgcctacggtgaaaaagtaaatatcttcccataaaaacgagacagaaggattctgagaaacaagtttgtgatgtgtgtactcagctaacagagtggaacctttctttttacagagcagctttgaaactctatttttgtggattctgcaaattgatatttagattgctttaacgatatcgttggaaatgggaatatcgtcatacaaaatctggacagaagcattctcacaaacttctttgtgacgtgtgtcctcaactaacagagttgaacctttcttttgatgcagcagtttggaaacactctttttgtagcaactgtaagtggatatttggatagctctaacgatttcgttggaaacgggaatatcatcatctaaaatctagacagaagcactattagaaactacttggtgatatctgcattcaagtcacagagttgaacattcccttactttgagcacgtttcaaacactcttttggaagaatctggaagtggacatttggagtgctttgatgcctttggtgaaaaggaaacgtcttccaataaaagccagacagaagcattctcagaaacttgtttgtgatgtgtgtactcaactaaaagagttgaacctttctattgatagagcagttttgaaacactctttttgtggattctgcaagtggatatttggattgctttgaggatttcgttggaagcgggaattcgtataaaaactagacagcagcattcccagaaatttctttccgatatatccattcaactcatagagatgaacatggcctttcatagagcaggtttgaaacactctttttgtagtttgtggaagtggacatttcgatcgccttgacgcctacggtgaaaaaggaaatatcttcccataaaaaatagacagaagcattctcagaaacttgttggtgatatgtgtcctcaactaacagagttgaactttgccattgatagagagcagttttgaaacactccttctgtggaatctgcaagtggatatttggatagcttggaggatttcgttggaagcgggaattcaaataaaaggtagacagcagcattctcagaaatttctttctgatgtctgcattcaactcatagagttgaagattccctttcatagagcaggtttgaaacactctttctcgagtatctggatgtggacatttggagcgctttgatgcctacggtgagaaagtaaatatcttcccataaaaacgagacagaaggattctgagaaacaagtttgtgatgtgtgtactcagctaacagagtggaacctctcttttgatgcagcagtttggaaacactctttttgtagaaactgtaagtggatatttggatagctctaatgatttcgttggaaacgggaatatcatcatataaaatctagacagaagccctctcagaaactactttgtgatatctgcattcaagtcacagagttgaacattcgctttcttagagcacgtttgaaacactctttttgtggtgtctggaagtggacatttggagcgctttgatgtctttggtgaaaaagggaatgtcttcccataaaaactagacagaagcattctcagaaagttgtttgtgatgtgtgtacccagccaaaggagttgaacatttctattgatagagcagttttgaaacactcttgttgtggaaaatgcaggtggatatttggatagcttggaggatttcgttggaagcgggaattcaaataaaaggtagacagcaggattctcagaaacaagtttgtgatgtgtgtactcagctaacagagtggatcctttctttttacagagcagctttgaaactctatatctgtggattctgcaaattgatatttgggttgatttaacgatatcgttggaaaagggaatatcttcatacaaaatctagagagaagcattctcacaaacttctttgtgatgtgtgtcctcaactaacagagttgaacctttcttttgatgcagcaatttggaaacacccttttggtagaaactgtaactggatatttggatagctctaacgatttcgttggaaacgggaatatcatcatctaaaatctagacagaagcactattagaaactacttggtgatatctgcattcaagtcacagagtagaacattcccttacttcgagcacgtttgaaacactcttttggaagaatctggaagtggacatttggagcgctttgatgcctttggtgaaaaggaaacgtcttccaataaaagccagacagaagcattctcagaaacttattcgtgatgtgtgtactcaactaaaagagttgaacctttctattgatagagcagtttagaaacactctttttgtggattctgcaagtggatatttggattgctttgaggatttcgttggaagcgggaattcgtataaacactagacagcagcattcccagaaatttcttttggatatttccattcaactcatagagatgaacatggcctttcatattgaaacactctttttgtagtttgtggaagtggacatttcgatcgctttgacgcctacggtgaaaaaggaaatatcttcccataaaaaatagacagaagcattctcagaaacttgttggtgatatgtgtcctcaactaacagagttgaactttgccattgatagagagcagttttgaaacactctttttgtggaatctgcaagtggatatttggatagcttggaggatttcgttggaagcgggaattcaaataaaaggtagacagcagcattctcagaaatttctttctgatgtctgcattcaactcatagagttgaagattccctttcatagagcaggtttgaaacactctttctggagtatctggatgtggacatttggagcgctttgatgcctacggtgaaaaagtaaatatcttcccagaaaaacgagacagaggattctgagaaacaagtttgtgatgtgtgtactcagctaacagagtggaacctctcttttgatgcagcagtttggaaatactctttttgtagaaactgtaagtggatatttggatagctctaatgatttcgttggaaacgggaatatcatcatctaaaatctagacagaagccctctcagaaactactttgtgatatctgcattcaagtcacagagttgaacattcgctttcttagagcacgtttgaaacactctttttgtagtgtctggaagtggacatttggagcgctttgatggctttggtgaaaaagggaatgtcttcccataaaaactagacagaagcattctcagaaacttgtttgtgatgtgtgtacccagctaaaggagttgaacatttctattgatagagcagtttttaaacactctttttgtggaaaatgcaagtggatatttggatagcttggaggatttcgttggaagcgggaattcaaataaaaggtagacagcagcattctcagaaatttccttctgatgtctgcattcaactcatagagttgaagactccctttcataaagcaggtttgaaacactctttctggagtatctggatgtggacatttggagcgcttggatgcctacggtgaaaaagtaaatatcttcccataaaaacgagacagaaggattctgagaaacaagtttgtgatgggcgtactcagctaacagagtggaacctctcttttgatgcagcagtttggaaaaactctttttgtagaaactgtaagtggatatttggatagctctaatgatttcgttggaaacgggaatatcatcatctaaaatctagacagaagccctctcagaaactactttgtgatatctgcattcaagtcacagagttgaacattcgctttcttagagcacgttggaaacactctttttgtagtgtctggaagtggacatttggagcgctttgattcctttggtgaaaaagggaatgtctacccataaaaactagacagaagcattctcagaaacttgtttgtgatgtgtgtacccacccaaaggagttgaacatttctattgatagagcagttttgaaacactctttttgtggaaaatgcaggtggatatttggatagcttggaggatttcgttggaagcgggaattcaaataaaagttagacagcagcattctcagaaatttctttctgatgtctgcattcaactcatatagttgaagattccctttcatagagcaggtttgaaacactcgttctggagtatccggatgtggacatttggagcgctttgatgcctacggtggaaaagtaaatatcttcccataaaaacgagacagaaggattctcagaaacaagtttgtgatgtgtgtactcagctaacagagtggaacctttctttttacagagcagctttgaaactctattgttgtggattctgcaaattgatatttagattgctttaacgatatcgttggaaaagggaataccgtcatacaaaatctagacagaagcattctcacaaacttctttgtgatgtgtgtcctcaactaacagagttgaacctttcttttgatgcagcaatttggaaacacccttttggtagaaactgtaactggatatttggatagctctaacgatttcgttggaaacgggaatatcatcatctaaaatgtagacagaagcactattagaaactacttggtgatatctgcattcaagtcacagagttgaacattcccttacttcgagcacgtttgaaacactcttttggaagaatctggaagtggacatttggagcgctttgatgcctttggtgaaaaggaaacgtcttccaataaaagccagacagaagcattctcagaaacttgttcgtgatgtgtgtactcaactaaaagagttgaacctttctattgatagagcagttttgaaacactctttttgtggattctgcaagtggatatttggattgctttgaggatttcgttggaagcgggaattcgtataaacactagacagcagcattcccagaaatttctttcggatatttccattcaactcatagagatgaacatggcctttcatagagcaggtttgaaacactctttttatagtttgtggaagtggacatttcgatcgccttgacgcctacggtgaaaaaggaaatatcttcccataaaaaatagacagaagcattctcagaaacttgttggtgatatgtgtcctcaactaacagagttgaactttgccattgatagagagcagttttgaaacactctttttgtggaatctgcaagtggatatttggatagcttggaggatttcgttggaagcgggaattcaaataaaaggtagacagcagcattctcagaaatttctttctgatgtctgcattcaactcatagagttgaagattccctttcatagagcaggtttgaaacactctttctggagtatctggatgaggacatttggagcgctttgatgcctacggtgaaaaagtaaatatcttcccataaaaacgagacagaaggattctcagaaacaagtttgtgatgtgtgtactcagctaacagagtggaacctctcttttgatgcagcagtttggaaacactctttttgtagaaactgtaagtggatatttggatagctctaatgatttcgttggaaacgggaatatcatcatctaaaatctagacagaagcactctcagaaactactttgtgatatctgcattcaagtcacagagttgaacattcgctttcttagagcacgtttgaaacactctttttgtagtgtctggaagtggacatttggagcgctttgattgcctttggtgaaaaagggaatgtctacccataaaaactagacagaagctttctcagaaacttgtttgtgatgtgtgtacccagcgaaaggagttgaacatttctattgatagagcagttttgaaacactctttttgtggaatctgcaagtggatatttggatagcttggaggttttcgttggaagcgggaattcaaataaaaggtagacagcagcattctcagaaatttctttctgatgtctgcattcaactcatagagttgaagattccctttcatagagcaggtttgaaacactcgttctggagtatctagatgtggacatttggagcgctttgatgcctacggtggaaaagtatatatcttcccataaaaacgagacagaaggattctcagaaacaagtttgtgatgtgtgtactcagctaacagagcggaacctttctttttacagagcagctttgaaactctatttttgtggattctgcaaattgatatttagatttctttaacgatatcgttggaaaagggaatatggtcatacaaaatctagacagaagcattctcacaaacatctttgtgatgtgtgtcctcaactaacagagttgaaccttccttttgatgcagcagtttggaaacactctttttgtagaaactgtaagtggatatttggatagatttaacgatttcattggaaacgggaatatcatcatctaaaatctagacagaagcactattagaaactacttggtgatatctgcattcaagtcacagagttgaacattcccttactttgagcacgtttgaaacactcttttggaagaatctggaagtggacatttggagcgctttgatgcctttggtgaaaaggaaacgtcttccaataaaagccagacagaagcattctcagaaacttgttcgtgatgtgtgtactcaactaaaagagttgaacctttctattgatagagcagttttgaaacactctttttgtggattctgcaagtggatatttggattgctttgaggatttcgttggaagcgggaattcgtataaacactagacagcagcattcccagaaatttctttcggatatttccattcaaatcatagagatgaacatggcctttcatagagcaggtttgaaacactctttttgtagtttgtggaagtggacatttcgatcgccttgacgcctacggtgaaaaaggaaatatcttcccataaaaaatagacagaagcattctcagaaacttcttggtgatatgtgtcctcaactaacagagttgaactttgccattgatagagagcagttttgaaacactctttttgtggaatctgcaagtggatatttggatagcttggaggatttcgttggaagcgggaattcaaataaaaggtagacagcagcattctcagaaatttctttctgatgtctgcattcaactcatagagttgaacattccctttcatagagcaggtttgaaacactctttctggagtatctggatgtggacatttggagcgctttgatgcctacggtgaaaaagtaaatatcttcccataaaaacgagacagaaggattctgagaaacaagtttgtgatgtgtgtactcagctaacagagtggaacctctcttttgatgcagcagtttggaaacactctttttgtagaaactgtaagtggatatttggatagctctaatgattccgttggaaacgggaatatcatcatctaaaatctagacagaagccctctcagaaactactttgtgatatctgcattcaagtcacagagttgaacattcgctttcttagagcacgttggaaacactctttttgtagtgtctggaagtggacatttggagcgctttgatgcctttggtgaaaaagggaacgtcttcccataaaaactagacagaagcattctcagaaacttgtttgtgatgtgtgtacccagccaaaggagttgaacatttctattgatagagcagttttgaaacactctttttgtggaaaatgcaagtggatatttggatagcttggaggatttcgttggacgcgggaattcaaataaaaggtagacagcagcattctcagaaatttctttctgatgtctgcattcaactcatagaggttgaagattccctttcatagagcaggtttgaaacactcgttctggagtatctggatgtggacatttggagcgctttgatgcctacggtggaaaagtaaatatcttcccataaaaacgagacagaaggattctgagaaacaagtttgtgatgtgtgtactcagctaacagagtggaacctttctttttacagagcagctttgaaactctatttttgtggattctgcaaatggatatttagattgctttaacgatatcgttggaaaagggaatatcgtcatacaaaatgctagacagaagcattctcacaaacttctttgtgatgtgtgtcctcaactaacagagttgaacctttcttttgatgcagcaatttggaaacacccttttggtagaaactgtaactggatatttggatagctctaacgattttgttggaaacgggaatatcatcatctaaaatctagacagaagcactattagaaactacttggtgatatctgcattcaagtcacagagtagaacattcccttacttcgagcacgtttgaaacactcttttggaagaatctggaagtggacatttggagcgctttgatgcctttggtgaaaaggaaacgtcttccaataaaagccagacagaagcattctcagaaacttgttggtgatgtgtgtactcaactaaaagagttgaacctttctattgatagagcagttttgaaacactctttttgtggattctgcaagtggatatttggattgctttgaggatttcgttggaagcgggaattcatataaaaactagacagcagcatttccagaaatttctttcggatatttccattcaactcatagagatgaacatggcctttcatagagcaggtttgaaacactctttttgtagtttgtggaagtggacatttcgatcgccctgatgcctatggtgaaaaaggaaatatcttctcataaaaaatagacagaagcattctcagaaacttgttggtgatatgtgtcctcaactaacagagttgatctttgccattgatagagagcagttttgaaacactctttttgtggaatctgcaagtggatatttggatagcttggaggatttcgttggaagcgggaattcaaataaaaggtagacagcagcattctcagaaatttctttctgatgtctgcattcaactcatagagttgaagattccctttcttagagcaggtttgaaacactctttctggagtatctggatgtggacatttggagcgcttggatgcctacggtgaaaaagtaaatatcttcccataaaaacgagacagaaggattctgagaaacaagtttgtgatgtgtgtactcagctaacagagtggaacctctcttttgatgcagcagtttggaaacactctttttgtagaaactgtaagtggatatttggatagctctaatgatttcgttggaaacgggaatatcatcatctaatatctagacagaagccctctcagaaactactttgtgatatctgcattcaactcacagagttgaacattcggtttcttagagcacgtttgaaacactctttttgtagtgtctggaagtggacatttggagcgctttgatgcctttggtgaaaaagggaacgtcttcccataaaaactagacagaagctttctcagaaacttgtttttgatgtgtgtacccagcgaaaggagttgaacatttctattgatagagcagttttgaaacactctttttgtggaatctgcaagtggatatttggatagcttggaggttttcgttggaagcgggaattcaaataaaaggtagacagcagcattctcagaaatttctttctgatgtctgcattcaactcatagagttgaagattccctttcatagagcaggtttgaaacactctttctggagtatctggatgtggacatttgcagcgctttgatgcctacggtgaaaaagtaaatatcttcccataaaaacgagacagaaggattctgagaaacaagtctgtgatgtgtgtactcagctaacagagtggaacctttctttttacagagcagctttgaaactctatttttgtggattctgcaaattgatatttagattgctttaacgatatcgttggaaaagggaatatcgtcatacaaaatctagacagaagcattctcacaaacttctttgtgatgtgtgtcctcaactaacagagttgaacctttcttttgatgcagcaatttggaaacacccttttggtagaaactgtaagtggatatttggatagctctaacgatttcattggaaacgggaatatcatcatctaaaatctagacagaagcactattagaaactacttggtgatatctgcattcaagtcacagagttgaacattcccttacttcgaccacgtttgaaacactcttttggaagaatctggaagtggacatttggagcgctttgatgcctttggtgaaaaggaaacgtcttccaataaatgccagacagaagcattctcagaaacttgttcgtgatgtgtgtactcaactaaaagagttgaacctttctattgatagagcagttttgaaacactctttttgtggattctgcaagtggatatttggattgctttgaggatttcgttggaagcgggaattcgtataaacactagacagcagcattcccagaaatttctttcggatatttccattcaactcatagagatgaacatggcctttcatattgaaacactctttttgtagtttgtggaagtggacatttcgatcgccttgacgcctacggtgaaaaaggaaatatcttcccataaaaaatagacagaagcattctcagaaacttgttggtgatatgtgtcctcaactaacagagttgaactttgccattgatagagagcagttttgaaacactctttttgtggaatctgcaagtggatatttggatagcttggaggatttcgttggaagcgggaattcaaataaaaggtagacagcaggattctcagaaacaagtttgtgatgtgtgtactcagctagcagagtggaacctttctttttacagagcagctttgaaactctatttttgtggattctgcaaattgatatttagattgctttaacgatatcgttggaaaagggaatatcatcatacaaaatctagacagaagctttctcagaaacttctttgtgatgtgtgtcctcaactaacagagttgaaactttctgttgatgcagcagtttggaaacactctttttgtagaaactgtaagtggatatttgggtaggtctaacgatatcgttggaaacgggaatatcttcatctaacgtatacacagaagcactattagaaactacttggtgatatctgcattcaagtcacagagtagaacattcccttacttcgagcacgtttgaaacactcttttggaagaatctggaagtggacatttggagcgctttgatgcctttggtgaaaaggaaacgtcttccaataaaagacagacagaagcattctcagaaacttgtttgtgatgtgtgtactcaactaaaagagttgaacctttctattgatagagcagttttgaaacactctttttgtggattctgcaagtggatatttggattgctttgaggatttcgttggaagcgggaattcatataaaaactagacagcagcattcccagaaatttctttcggatatttccattcgactcatagagatgaacatggcctttcatagagcaggtttgaaacactctttttgtagtttgtggaagtggacatttcgatcgccttgacgcctacggtgaaaaaggaaatatcttcccataaaaaatagacagaagcattctcagaaacttgtttgtgatgtgtgtacccagccaaaggagttgaacatttctattgatagagcagttttgaaacactctttttgtggaaaatgcaggtggatatttggatagcttggaggatttcgttggaagcgggaattcatataaaaactagacagcagcattcccagaaatttctttctgatgtctgcattcaactcatagagttgaagattccctttcatagagcaggtttgaaacactcgttctggagtatctggatgtggacatttggagcgctttgatgcctacggtggaaaagtaaatatcttcccataaaaacgagacagaaggattctcagaaacatgtttgtgatgtgtgtactcagctaacagagtggatcctttctttttacagagcagctttgaaactctatttctgtggattctgcaaattgatatttgggttgatttaacgatatctttggaaaagggaatatcttcatacaaaatctagagagaagcattctcacaaacttctttgtgatgtgtgtcctcaactaacagagttgaacctttcttttgatgcatcagtttggaaacactctttttgtagaaactgtaagtggatatttggatagctctaacgatttcgttggaaacgggaatatcatcatctaaaatctagacagaagcactattagaaactacttggtgatatctgcattcaagtcacagagttgaacattcccttactttgagcacgtttcaaacactcttttggaagaatctggaagtggacatttggagcgctttgatgcctttggtgaaaaggaaacgtcttccaataaaagccagacagaagcattctcagaaacttgtttgtgatgtgtgtactcaactaaaagagttgaacctttctattgatagagcagttttgaaacactctttttgtggattctgcaagtggatatttggattgctttgaggatttcgttggaagcgggaattcgtataaaaactagacagccagcattcccagaaatttctttcggatatttccattcaactcatagagatgaacatggcctttcatagagcaggtttgaaacactctttttgtagtttgtggaagtggacatttcgatcgccttgacgcctacggtgaaaaaggaaatatcttcccataaacaatagacagagcattctcagaaacttgttggtgatatgtgtcctcaactaacagagttgaactttgccattgatagagagcagttttgaaacactctttttgtggaatctgcaagtggatatttggatagcttggaggatttcgttggaagcgggaattcaaataaaaggtagacagcagcattctcagaaatttctttctgatgtctgcattcaactcatagagttgaagattccctttcatagagcaggtttgaaacactctttctggagtatctggatgtggacatttggagcgctttgatgcctacggtgaaaaagtaaatatcttcccagaaaaacgagacagaaggattctgagaaacaagtttgtgatgtgtgtactcagctaacagagtggaacctctcttttgatccagcagtttggaaacactctttttgtagaaactgtaagtggatatttggatagctctaatgatttcgttggaaacgggaatatcatcatctaaaatctagacagaagccctctcagaaactactttgtgatatctgcattcaagtcacagagttgaacattcgctttcgtagagcacgttggaaacactctttttgtagtgtctggaagtggacatttggagcgctttgatgcctttggtgaaaaagggaatgtcttcccataaaaactagacagaagcattctcagaaacttgtttgtgatctgtgtacccagcgaaaggagttgaacatttctattgatagagcagttttgaaacactctttttgtggaatctgcaagtggatatttggatagcttggagtttttcgttggaagcgggaattcaaataaaagctagacagcagcattctgagaaatttctttctgatgtctgcattcaactcatagagttgaagattccctttcatagagcaggtttgaaacactctttctggagtatctggatgtggacatttggagcgctttgatgcctacggtgaaaaagtaaatatcttcccataaaaacgagacagaaggattctcagaaacaagtttgtgatgtgtgtactcagctaacagagtggaacctctcttttgatgcagcagtttggaaacactctttttgtggaaactgtaagtggatatttggatagctctaatgatttcgttggaaacgggaatatcatcatctaaaacctagacagaagccctctcagaaactactttgtgatatctgcattcaagtaacagagttgaacattcggtttcctagagcacgtttgaaacactcttttcgtagtgtcaggaagtggacatttggagcgctttgatgcctttggtgaaaaagggaatgtcttcccataaaaactagacagaagcattctcagaaacttgtttgtgatgtgtgtacccagcaaaaggagttgaacatttctattgatagagcagttttgaaacactcttgttgtggaaaatgcaggtggatatttggatagcttggaggatttcgttggaagcgggaattcaaataaaaggtagacagcagcattctcagaaatttctttctgatgtctgcattcaactcatagagttgaagattccctttcatagagcaggtttgaaacactcgttctggagtatctggatgtggacatttggagcgctttgatgcctacggtggaaaagtaaatatcttcccataaaaacgaaacagaaggattctcagaaacaagtttgtgatgtgtgtactcagctaacagagtggaacctttctttttacagagcagctttgaaactctgtttttgtggattctgcaaattgatatttagattgctttaacgatatcgttggaaaagggaatatcgtcatacaaaatctagacagaagcattctcacaaacttctttgtgatgtgtgtcctcaactaacagagttgaacctttcttttgatgcagcagtttggaaacactgtttttgtagcaactgtaagtggatatttggatagctctaacgatttcgttggaaacgggaatatcatcatctaaaatctagacagaagcactattagaaactacttggtgatatctgcattcaagtcacagagttgaacattcccttactttgagcacgtttcaaacactcttttggaagaatctggaagtggacatttggagcgctttgatgcctttggtgaaaagggaaacgtcttccaaaaaaagccagacagaagcattctcagaaacttgtttgtgatgtgtgtactcaactaaaagagttgaacctttctattgatagagcagttttgaaacactctttttgtggattctgcaagtggatatttggattgctttgaggatttcgttggaagcgggaattcgtataaaaactagacagcagcattcccagaaatttctttcggatatttccattcgactcatagagatgaacatggcctttcatagagcaggtttgaaacactctttttgtagtttgtggaagtggacatttcgatcgccttgacgcctacggtgaaaaaggaaatatcttcccataaaaaatagacagaagaattctcagaaacttgtttgtgatgtgtatcctcaactgacagagttgaaccttgccattgatagagcagtttagaaacactgtttttgtggaatctgcaagtggatatttggatagcctggaggatttcgttggaagcgggaattcaaataaaaggtagacagcagcattctcagaaatttctttgtgatgtttgcattcaactcatagagttgaacattccctttcatagagcaggtttgaaacactctttctgtactatctagatgtggacatttggaacgctttgatgcctacggtggaaaagtaaatatcttcccataaaagctagacagaaggattctcagaaacaagtttgtgatgtgtgttctcagctaacagagtggaacctctcttttcatgcagcagtttggaaacactctttttgtagaaactgtaagtggatatttggatagctctaatgatttcgttggaaacgggaatatcatcatctaaaatctagacagaagccctctcagaaactactttgtgatatctgcattcaagtcacagagttgaacattcgctttctaagagcacgtttgaaacactctttttgtagtgtctggaagtggacatttggagcgctttgatgcctttggtgaaaaagggaacgtcttcccataaaaactagacagaagcattctcagaaacttgtttgtgatgtgtgtacccagccaaaggagttgaagatttctattgatagagcagttttgaaacactcttgttgtggaaaatgcaggtggatatttggatagcttggaggatttcgttggaagcgggaattcaaataaaaggtagacagcagcattctcagaaatttctttctgatgtctgcattcaactcatagagttgaagattccctttcatagagcaggtttgaaacactctttgtggagtatctggatgtggacatatggagcgctttgatgcctacggtgaaaaggtaaatatcttcccataaaaacgagacagaaggattctcagaaacaagtttgtgatgtgtgtactcagctaacagagtggatcctttctttttaaagagcagctttgaaactctatttctgtggattctgcaaattgatatttgggttgatttaacaatatcgttggaaaagggaatatcttcatacaaaatctagacagaagcattctcacaaacttctttgtgatgtgtgtcctcaactaacagagttgaacctttcttttgatgcagcagtttggaaacactctttttgtagaaactgtaaggggatatttggatagctctaacgatttcgttggaaacgggaatatcatcatctaaaatctagacagaagcactattagaaactacttggtgatatctgcattcaagtcacagagttgaacattcccttactttgagcacgtttcaaacactcttttggaagaatctggaagtggacatttggagcgctttgatgcctttggtgaaaaggaaacgtcttccaataaaagccagacagaagcattctcagaaacttgtttgtgatgtgtgtactcaactaaaagagttgaacctttctattgatagagcagttttgaaacactctttttgtggattctgcaagtggatatttagattgctttgaggatttcgttggaagcgggaattcgtataaaaactagacagcagcattcccagaaatttctttcggatatttccattcaactcatagagatgaacatggcctttcatagagcaggtttgaaacactctttttgtagtttgtggaagtggacatttcgatcgccttgacgcctacggtgaaaaaggaaatatcttcccataaaaaatagacaggagcattctcagaaacttgttggtgatatgtgtcctcaactaacagagttgaactttgccattgatagagagcagttttgaaacactctttttgtggaatctgcaagtggatatttggatagcttggaggatttcgttggaagcgggaattcaaataaaaggtagacagcagcattctcagaaatttctttctgatgtctgcattcaactcatagagttgaagattccctttcatagagcaggtttgaaacactctttctggagtgtctggatgtggacatttggagcgctttgatgcctacggtgaaaaagtaaatatcttcccataaaaacgagacagaaggattctgagaaacaagtttgtgatgtgtgtactcagctaacagagtggaacctctcttttgatgcagcagtttggaaacactctttttgtagaaactgtaaggggatatttggatagctctaatgatttcgttggaaacgggaatatcatcatctaaaatctagacagaagccctctcagaaactactttgtgatatctgcattcaagtcacagagttgaatattcgctttcttagagcacgtttgaaaccctctttttgtagtgtctggaagtggacatttggagcgctttgatgcctttggtgaaaaagggaatgtcttcccataaaaactagacagaagcattctcagaaacttgtttgtgatgtgtgtacccagctaaaggagttgaacatttctattgatagagcagttttgaaacactctttttgtggaaaatgcaagtggatatttggatagcttggaggatttcgttggaagagggaattcaaataaaaggtagacagcagcattctcagaaatttctttctgatgtctgcattcaactcatagagttgaagattccctttcatagagcaggtttgaaacactctttctggagtatctggatgtggacatttggagcgctttgatgcctacggttaaaaagtaaatatcttcccataaaaacgagacagaaggattctcagaaacaagtttgtaatgtgtgtactcagctaacacagtggaacctttctttttacagagcagctttgaaactctattgttgtggattctgcaaattgatatttagattgctttaacgatatcgttggaaaagggaataccgtcatacaaaatctagacagaagcattctcacaaacttctttgtgatgtgtgtcctcaactaacagagttgaacctttcttttgatgcagcaatttggaaacacccttttggtagaaactgtaactggatatttggatagctctaacgatttcgttggaaaagggaatatcatcatctaaaatgtaggcagaagcactattagaaactacttggtgatatctgcattcaaatcacagagtagaacattcccttacttcgagcacgtttgaaacactcttttggaagaatctggaagtggacatttggagcgctttgatgcctttggtgaaaaggaaacgtcttccaataaaagccagacagaagcattctcagaaacttgttcgtgatgtgtgtactcaactaaaagagttgaacctttctattgatagagcagttttgaaacactctttttctggattctgcaagtggatatttggattgctttgaggatttcgttggaagcgggaattcatataaaaactagacagccagcattcccagaaatttctttcggatatttccattcaactcatagagatgaacatcgcctttcatagagcaggtttgaaacactctttttgtagtttgtggaagtggacatttcgatcgccttgacgcctacggtgaaaaaggaaatatcttcccataaacaatagacagagcattctcagaaacttgttggtgatatgtgtcctcaactaacagagttgaactttgccattgatagagagcagttttgaaacactctttttgtggaatctgcaagtggatatttggatagcttggaggatttcgttggaagcgggaattcaaataaaaggtagacagcaggattctgagaaacaagtttgtgatgtgtgtactcagctaacagagtggaacctctcttttgatccagcagtttggaaacactctttttgtagaaactgtaagtggatatttggatagctctaacgatttcgttggaaacgggaatatcatcatctaaaatctagacagaagcattctcacaaacttctttgtgatgtgtgtcctcaactaacagagttgaacctttcttttgatgcagcaatttggaaacacccttttggtagaaactgtaagtggatatttggatagctctaacgatttcgttggaaacgggaatatcatcatctaaaatctagacagaagcactattagaaactacttggtgatatctgcattcaagtcacagagttgaacattcccttactttgagcacgtttcaaacactcttttggaagaatctggaagtggacatttggagcgctttgatgcctttggtgaaaaggaaacgtcttccaataaaagccagacagaagcattctcagaaacttgtttgtgatgtgtgtactcaactaaaagagttgaacctttctattgatagagcagttttgcaacactctttttgtggattctgcaagtggatatttggattgctttgaggatttcgttggaagcgggaattcatataaaaactagacagcagcattcccagaaatttctttcggatatttccattcaactcatagagatgaacatggcctttcatagagcaggtttgaaacactctttttgtagtttgtggaagtggacatttcgatcgccttgacgcctacggtgaaaaaggaaatatcttcccataaaaaatagacagataagcattctcagaaacttgttggtgatatgtgtcctcaactaacagagttgaactttgccattgatagagagcagttttgaaacactctttttgtggaatctgcaagtggatatttggatagcttggaggatttcgttggaagcgggaattcaaattaaaggtagacagcagcattctcagaaatttctttctgatgtctgcattcaactcatagagttgaagattccctttcatagagcaggtttgaaacactctttctggagtatctggatgtggacatttggagcgctttgatgcctacggtaaaaagtaaatatcttcccataaaaacgagacagaaggattctgagaaacaagtttgtgatgtgtgtactcagctaacagagtggaacctttctttttacagagcagctttgaaactctatttttgtggattctgcaaatggatatttagattgctttaatgatatcgttggaaaagggaatatcgtcatacaaaatctagacagaagcattctcacaaacttctttgtgatgtgtgtcctcaactaacagagttgaacctgtcttttgatgcagcaatttggaagcacccttttggtagaaactgtaactggatatttggatagctctaacgatttcgttggaaacgggaatatcatcatctaaaatgtagacagaagcactattagaaactacttgttgatatctgcattcaagtcacagagttgagcattcccttactttgagcacgtttgaaacactcttttggaagaatctggaagtggacatttgcagcgctttgatgcctttggtgaaaaggaaacgtcttccaataaaagccagacagaagcattctcagaaacttgtttgtgatgtgtgtactcaactaaaagagttgaacctttctattgatagagcagttttgaaacactctttttgtggattctgcaagtggatatttggattgctttgaggatttcgttggaagcgggaattcgtataaaaactagacagcagcattcccagaaattttttcggatatttccattcgactcatagagatgaacatggcctttcatagagcaggtttgaaacactctttttgtagtttgtggaagtggacatttcgatcgccttgacgcctacggtgaaaaaggaaatatcttcccataaaaaatagacagaagcattctcagaaacttgttggtgatatgtgtcctcaactaacagagttgaactttgccattgatagagagcagttttgaaacactctttttgtggaatctgcaagtggatatttggatagcttggaggatttcgttggaagcgggaattcaaataaaaggtagacagcagcattctcagaaatttctttctgatgtctgcattcaactcatagagttgaagattccctttcatagagcaggtttgaaacactctggagtatctggatgtggacatttggagcgctttgatgcctacggtgaaaaagtaaatatcttcccataaaaacgagacagaaggattctcagaaacaagtttgtgatgtgtatactcagctaacagagtggaacctttctttttacagagcagctttgaaactctacttttgtggattctgcaaattgatatttagattgctttaacgatatcgttggaaaagggaatatcgtcatacaaaatctagacagaagcattctcacaaacttctttgtgacgtgtgtcctcaactaacagagttgaacctttcttttgatgcagcagtttggaaacactgtttttgtagcaactgtaagtggatatttggatagctctaacgatttcgttggaaacgggaatatcgtcatctaaaatctagacagaagcactattagaaactacttggtgatatctgcattcaagtcacagagttgaacattcccttactttgagcacgtttcaaacactcttttggaagaatctggaagtggacatttggagcgctttgatgcctttggtgaaaaggaaacgtcttccaataaaagccagacagaagcattctcagaaacttgtttgtgatgtgtgtactcaactaaaagagttgaacctttctattgatagagcagttttgaaacactctttttgtggattctgcaagtggatatttggattgctttgaggatttcgttggaagcgggaattcgtataaaaactagacagcagcattcccagaaatttctttcggatatttccattcgactcatagagatgaacatggcctttcatagagcaggtttgaaacactctttttgtagtttgtggaagtggacatttcgatcgccttgacgcctacggtgaaaaaggaaatatcttcccataaaaaatagacagaagcattctcataaacttgttggtgatatgtgtcctcaactaacagagttgaactttgccattgatagagagcagttttgaaacactctttttgtggaatctgcaagtggatatttggatagcttggaggatttcgttggaagcgggaattcaaataaaaggtagacagcagcattctcagaaatttctttctgatgtctgcattcaactcatagagttgaagattccctttcatagagcaggtttgaaacactctttctggagtatctggatgtggacatttggagcgctttgatgcctacggtgaaaaagtaaatatcttcccataaaaacgagacagaaaggattctcagaaacaagtttgtgatgtgtgtactcagctaacagagtggaacctcttttctgatgcagcagtttggaaacactctttttgtagaaactgtaagtggatatttggatagctctaatgatttcgttggaaacgggaatatcatcatctaaaatctagacagaagcactctcagaaaccactgtgtgatatctgcattcaagtcacagagttgaacattcgctttcttagagcacgtttgaaacactctttttgtagtgtctggaagtggacatttggagcgctttgattcctttggtgaaaaagggaatgtctacccataaaaactagacagaagcattctcagaaacttgtttgtgatgtgtgtacccagcgaaaggagttgaacatttctattgatagagcagttttgaaacactctttttgtggaatctgcaagtggatatttggatagcttggaggtttttgttggaagcgggaattcaaataaaaggtagacagcagcattctcagaaatttctttctgatgtctgcattcaactcatagagttgaagattccgtttcatagagcaggtttgaaacactctttctggagtatctggatgtggacatttggagcgctttgatgcctacggtggaaaagtaaatatcttcccataaaaacgagacagaaggattctgagaaacaagtttgtgatgtgtgtactcagctaacagagtggaacctttctttttacagagcagctttgaaactctatttttgtggattctgcaaatggatatttagattgctttaacgatatcgttggaaaagggaatatcttcatacaaaatctagacagaagcattctcacaaacttctttgtgatgtgtgtcctcaactaacagagttgaacctttcttttgatgcagcaatttggaaacacccttttggtagaaactgtaagtggatatttggatagctctaacgatttcgttggaaacgggaatatcatcatctaaaatctagacagaagcactattagaaactacttggtgttatctgcattcaagtcacagagtagaacattcccttacttcgagcacgtttgaaacactcttttggaagaatctggaagtggacatttggagcgctttgatgcctttggtgaaaaggaaacgtcttccaataaaagccagacagaagcattctcagaaacttgttggtgatgtgtgtactcaactaaaagagttgaacctttctattgatagagcagttttgaaacactctttttgtggattctgcaagtggatatttggattgctttgaggatttcgttggaagcgggaattcatataaaaactagacagccagcattcccagaaatttctttcggatatttccattcaactcatagagatgaacatcgcctttcatagagcaggtttgaaacactctttttgtagtttgtggaagtggacatttcgatcgccttgacgcctacggtgaaaaaggaaatatcttcccataaaaaatagacagaagcattctcagaaacttgttggtgatatgtgtcctcaactaacagagttgaactttgccattgatagagagcagttttgaaacactctttttgtggaatctgcaagtggatatttggatagcttggaggatttcgttggaagcgggaattcaaataaaaggtagacagcagcattctcagaaatttctttctgatgtctgcattcaactcatagagttgaagattccctttcatagagcaggtttgaaacactcgttctggagtatctggatgtggacatttggagcgctttgatgcctacggtggaaaagtaaatatcttcccataataacgagacagaaggattctgagaaacaagtttgtgatgggcgtactcagctaacagagtggaacctctcttttgatgcagcagtttggaaacactctttttgtagaaactgtaagtggatatttggatagctctaatgatttcgttggaaacgggaatatcatcatctaaaatctagacagaagccctctcagaaactactttgtgatatctgcattcaagtcacagagttgaacattcgctttcttagagcacgtttgaaacactctttttgtagtggctggaagtggacatttggagcgctttgattcctttggtgaaaaagggaatgtctacccataaaaactagacagaagcattctcagaaacttgtttgtgatgtgtgtacccagctaaaggagttgaacgtttctattgatagagcagttttgaaacactctttttgtggaaaatgctagtggatatttcgatagcttggaggattttccttggaagcgggaattcaaataaaaggtagacagcaggagtctgagaaacaagtttgtgatgtgtgtactcagctaacagagtggaacctctcttttgatgcagcagtttggaaacactctttttgtagaaactgtaagtggatatttggatagctctaaagatttttttggaaacgggaatatcatcatctaaaatctagacagaaagccctctcagaaactactttgtgatatctgcattcaagtcacagagttgaacattcgctttcttagagcacgttggaaacactctttttgtagtgtctggaagtggacatttggagcgctttgatgcctttggtgaaaaagggaacgtcttcccataaaaactagacagaagcattctcagaaacttgtttgtgatgtgtgtacccagccaaaggagttgaacatttctattgatagagcagttttgaaacactctttttgtggaaaatgcaagtggatatttggatagcttggaggatttcgttggaagcgggaattcaaataaaaggtagacagcaggattctgagaaacaagtttgtgatgtgtgtactcagctaacagagtggaacctctcttttgatgcagcagtttggaaacactctttttgtagaaactgtaagtggttatttggatagctctaatgatttcgttggaaacgggaatatcatcatctaaaatctagacagaagccctctcagaaactactttgtgatatctgcattcaagtcacagagttgaacattcgctttcttagagcacgctggaaacactctttttgtagtgtctggaagtggacatttggagcgctttgatgcctttggtgaaaaagggaacgtcttcccataaaaactagacagaagcattctcagaaacttgtttgtgatgtgtgcacccagctaaaggagttgaacatttctattgatagagcagttttgaagcactctttttgtggaaaatgcaagtggatatttggatagcttggaggatttcgttggaagcgggagttcaaataaaaggtagacagcagcattctcagaaatttctttctgatgtctgcattcaactcatagagttgaagattccctttcatagagcaggtttgaaacactcgttctggagtatctggatgtggacatttggagcgctttgatgcctacggtggaaaagtaagtatcttcccataaaaacgagacataaggattctcagaaacaagtttgtgatgtgtgtactcagctaacagagtggaacctttctttttacagagcagctttgaaactctatttttgtggattctgcaaatggatatttagattgctttaatgatatcgctgggaaagggaatatggtcatacaaaatctagacagaagcattctcacaaacttctttgtgatgtgtgtcctcaactaacagagttgaacctttcttttgatgcagcagtttggaaacacccttttggtagaaactgtaagtggatatttggatagctctaacgatttcgttggaaacgggaatatcgtcatctaaaatctagacagaagcactattagaaactacttggtgatatctgcattcaagtcacagagttgaacattcccttactttgagcacgtttcaaacactcttttggaagaatctggaagtggacatttggagcgctttgatgcctttggtgaaaaggaaacgtcttccaataaaagccagacagaagcattctcagaaacttgtttgtgatgtgtgtactcaactaaaagagttgaacctttctattgatagagcagttttgaaacactctttttgtggattctgcaagtggatatttggattgctttgaggatttcgttggaagcgggaattcgtataaaaactagacagcagcattcccagaaatttctttcggatatttccattcaactcatagagatgaacatggcttttcatagagcaggtttgaaacactctttttgtagtttgtggaagtggacatttcgatcgccttgacgcctacggtgaaaaaggaaatatcttcccataaaaaatagacagaagcattctcagaaacttgttggtgatatgtgtcctcaactaacagagttgaactttgccattgatagagagcagttttgaaacactctttttgtggaatctgcaagtggatatttggatagcttggaggatttcgttggaagcgggaattcaaataaaaggtagacagcagcattctcagaaatttctttctgatgtctgcattcaactcataaagttgaagattccctttcatagagcaggtttgaaacactctttctggagtatctggatgtggacatttggagcgctttgatgcctacggtggaaaagtaaatatcttcccataaaaacgagacagaaggattctgagaaacaagtttgtgatgtgtgtactcagctaacagagtggaacctctcttttgatgcagcagtttggaaacactctttttgtagaaactgtaagtggatatttggatagctctaatgatttcgttggaaacgggaatatcatcatctaaatctagacagaagcactctcagaaactactttgtgatatctgcattcaagtcacagagttgaacattcgctttcttagagcacgttggaaacactctttttgtagtgtctggaagtggacatttggagcgcattgatgcctttggtgaaaaagggaacgtcttcccataaaaactagacagaagcattctcagaaacttgtttgtgatgtgtgtacccagctaaaggagttgaacatttctattgatagagcagttttgaaacactctttttgtggaaaatgctagtggatatttcgatagcttggaggatttccttggaagcgggaattcaaataaaaggtagacagcagcattctcagaaattactttctgatgtctgcattcaactcatagagttgaagattccctttcatagagcaggtttgaaacactctttctgtagtatctggatgtggacatttggggcgctttgatacctacggtgaaaagtaaatatcttcccataaaaactagacagaaggattctcagaaacaagtttgtgatgtgtgtactcagctaacagagtggaacctttctttttacagagcagctttgaaactctatttttgtggattctgcaaattgatatttagattgctttaacgatatcgttggaaaagggaatatggtcatacaaaatctagacagaaagcattctcacaaacttctttgtgatgtgtgtcctcaactaacagagttgaacctttcttttgatgcagcaatttggaaacacccttttggtagaaactgtaactggatatttggatagctctaacgatttcgttggaaacgggaatatcatcatctaaaatgtagacagaagcactattagaaactacttggtgatatctgcattcaagtcaaagagttgaacattcccttactttgagcacgtttgaaacactcttttggaagaatctggaagtggacatttggagcgctttgatgcctttggtgaaaaggaaacgtcttccaataaaagccagacagaagcattctcagaaacttgtttgtgatgtgtgtactcaactaaaagagttgaacctttctattgatagagcagttttgaaacactctttttgtggattctgcaagtggatatttggattgctttgaggatttcgttggaagcgggaattcgtataaaaactagacagcagcattcccagaaatttctttcggatatttccattcgactcatagagatgaacatggcctttcatagagcaggtttgaaacactctttttgtagtttgtggaagtggacatttcgatcgccttgacgcctacggtgaaaaaggaaatatcttcccataaaaaatagacagaagcattctcagaaacttgttggtgatatgtgtcctcaactaacagagttgaactttgccattgatagagagcagttttgaaacactctttttcctgaatctgcaagtggatatttggatagcttggaggatttcgttggaagcgggaattcaaataaaagttagacagcagcattctcagaaatttctttctgatgtctgcattcaactcatagagttgaagattccctttcatagagcaggtttgaaacactctttctggagtatctggatgtggacatttggagcgctttgatgcctacggtgaaaaagtaaatatcttcccagaaaaacgagacagaaggattctcagaaacaagtttgtgatgtgtgtactcagctaacagagtggaacctctcttctgatgcagcagtttggaaacactctttttgtagaaactgtaagtggatatttggatagctctaatgatttcgttggaaatgggaatatcatcatctaaaatctagacggaatccctctcagaaactactttgtgatatctgcattcaagtcacagagttgaacattcgctttcttagagcacgtttgaaacactctttttgtagtgtctggaagtggacatttggagcgctttgatgcctttggtgaaaaagggaatgtcttcccataaaaactagacagaagcattctcagaaacttgtttgtgatgtgtgtacccagctaaaggagttgaacatttctattgatagagcagttttgaaacactctttttgtggaaaatgcaagtggatatttggatagcttggaggatttcgttggaagcgggaattcaaataaaaggtagatagcagaattctcagaaatttctttctgatgtctgcattcaactcatagagttgaagattccctttcatagagcaggtttgaaacactcgttctggagtatctggatgtggacatttggagcgctttgatgcctacggtggaaaagtaaatatcttcccataaaaacgagacagaaggattctcagaaacaagtttgtgatgtgtgtactcagctaactgagtggaacctttctttttacagagcagctttgaaactctatttttgtggattctgcaaattgatatttagattgctttaacgatatcgttggaaaagggaatgtcgtcatacaaaatctggacagaagcactctcagaaacttactcgtgatgtgtgtcctcaactaaaggagtagaacctttcttttcatagagaagttttgaaacactctttttgtagaaactgtaagtggatatttggatagctctaacgatttcgttggaaacgggaatatcatcatctaaaatctagacagaagcactattagaaactacttggtgatatctgcattcaagtcaaagagttgaacattcccttactttgagcacgtttgaaacactcttttggaagaatctggaagtggacatttggagcgctttgatgcctttggtgaaaaggaaacgtcttccaataaaagccagacagaagcattctcagaaacttgtttgtgatgtgtgtactcaactaaaagagttgaacctttctaatgatagcgcagttttgaaacactctttttgtggattctgcaagtggatatttggattgctttgaggatttcgttggaagcgggaattcatataaaaactagacagcagcattcccagaaatttctttcggatatttccattcgactcatagagatgaacatggcctttcatagagcaggtttgaaacactctttttgtagtttgtggaagtggacattttgatcgccttgacgcctacggtgaaaaaggaattatcttcccataaaaaatagacagaagcattctcagaaacttgttggtgatatgtgtcctcaactaacagagttgaactttgccattgatagagagcagttttgaaacactctttttgtggaatctgcaagtggatatttggatagcttggaggatttcgttggaagcgggaattcaaataaaaggtagacagcagcattctcagaaatttctttctgatgtctgcattcaactcacagagttgaagattccctttcatagagcaggtttgaaacactctttctggagtatctggatgtggacatttggagcgctttgatgcctacggtgaaaaagtaaatatcttcccagaaaaacgagacagaaggattctcagaaacaagtttgtgatgtgtgtactcagctaacagagtggaacctttctttttacagagcagctttgaaactctatttttgtggattctggaaattgatatttagattgctttaacgatatcgttggaaaagggaatatcgtcatacaaaatctggacagaagcattctcacaaacttctttgtgatgtgtgtcctcaactaacagagttgaacttttcttttgatgcagcagtttggaaacactgtttttgtagaaaatgtaagtggatatttggatagctctaacgatttcgttggaaacgggaatatcatcatctaaaatctagacagaagcactattagaaactacttggtgatatctgcattcaagtcacagagttgaacattcccttactttgagcacgtttcaaacactcttttggaagaatctggaagtggacatttggagcgctttgatgcctttggtgaaaaggaaacgtcttccaataaaagccagacagaagcattctcagaaacttgtttgtgatgtgtgtactcaactaaaagggttgaacctttctattgatagagcagttttgaaacactctttttgtggattctgcaagtggatatttggattgctttgaggatttcgttggaagcgggaattcgtataaaaactagacagcagcattcccagaaatttctttcggatatttccattcaactcatagagatgaacatggcctttcatagagcaggtttgaaacacactttttgtagtttgtggaagtggacatttcgatcgccttgacgcctacgctgaaaaaggaattatcttcccataaaaaatagacagaagcattctcagaaacttgttggtgatatgtgtcctcaactaacagagttgaactttgccattgatagagagcagttttgaaacactctttttgtggaatctgcaagtggatatttggatagcttggaggatttcgttggaagcgggaattcaaataaaaggtagacagcagcattctcagaaatttctttctgatgtctgcattcaactcatagagttgaaccttccctttcatagagcaggtttgaaatactctttctgtagtatctggatgtggacatttggagcgctttgatgcctacggtgaaaaagtaaatctcttcccataaaaacgagacagaaggattctgagaaacaagtttgtgatgtgtgtactcagctaacagagtggaaccactcttttgatgcagcagtttggaaacactctttttgtagaaactgtaagtggatatttggatagctctaatgatttcgttggaaacgggaatatcatcatctaaaatctagacagaagcactctcagaaactactttgtgatatctgcattcaagtcacagagttgaacattcgctttcttagagcacgtttgaaacagtctttttgtagtgtctggaagtggacatttggagcgctttgatggctttggtgaaaaagggaacgtcttcccataaaaactagacagaagcattctcagaaacttgtttgtgatgtgtgtacccagccaaaggagttgaacatttctattgatagagcagttttgaaacactctttttgtggaaaatgcaagtggatatttggatagcttggaggatttcgttggaagcgttaattcaaataaaaggtagacagcaggattctgagaaacaagtttgtgatgtgtgtactcagctaacagagtggaacctttctttttacagagcagctttgaaactctatttttgtggattctgcaaatggatatttagattgcattaatgatatcgctggaaaagggaatatggtcatacaaaatctagacagaagcattctcacaaacttctttgtgatgtgtgtcctcaactaacagagttgaacctttcttttgatgcagcagtttggaaacactctttttgtagaaactgtaagtggatatttggatagctctaacgatttcgttggaaacgggaatatcatcatctaaaatgctagacagaagcactattagaaactacttggtgatatctgcattcaagtcacagagttgaacattcccttactttgagcacgtttgaaacactcttttggaagaatctggaagtggacatttggagcgctttgatgcctttggtgaaaaggaaacgtcttccaataaaagccagacagaaagcattctcagcaaacttgttggtgatgtgtgtactcaactaaaagagttgaacctttctattgatagagcagttttgaaacactctttttgtggattctgcaagtggatatttggattgctttgaggatttcgttggaagcgggaattcgtataaacactagacagcagcattcccagaaatttctttcggatatttccattcaactcatagagatgaacatggcctttcatagagcaggtttgaaacactctttttgtagtttgtggaagtggacatttcgatcgccttgacgcctacggtgaaaaaggaaatatcttcccataaacaatagacagaagcattctcagaaacttgttggtgatatgtgtcctcaactaacagagttgaactttgccattgatagagcgcagttttgaaacactctttttgtggaatctgcaagtggatatttggatagcttggaggatttcgttggaagcggtaattcaaataaaaggtagacagcagcattctcagaaatttctttctgatgtctgcattcaactcatagagttgaagattccctttcatagagcaggtttgaaacactctttctggagtatctggatgtggacatttggagcgctttgatgcctacggtgagaaagtaaatatcttcccataaaaacgagacagtaaggattctgagaaacaagtttgtgatgtgtgtactcagctaacagagtggaacctctcttttgatgcagcagtttggaaacactctttttgtagaaactgtaagtggatatttggatagctctaatgatttcgttggaaacgggaatatcatcatctaaaatctagacagaagccctctcagaaactactttgtgatatctgcattcaagtcacagagttgaacattcgctttcttagagcacgtttgaaacactctttttgtagtgtctggaagtggacatttggagcgctttgattcctttggtgaaaaagggaatgtctacccataaaaactagacagaagcattctcagtaaacttgtttgtgatgtgtgtacccagctaaaggagttgaacatttctattgatagagcagttttgaaacactctttttgtggaaaatgcaagtggatatttggatagcttggaggatttcgttggaagcgggaattcaaataaaaggtagacaggagcattctcagaaatttctttctgatgtctgcattcaactcatagagttgaagattccctttcatagagcaggtttgaaacactcgttctggagtatccggatgtggatatttggagcgctttgatgcctacggtggaaaagtaaatatcttcccataaaaacgagacagaaggattctcagaaacaagtttgtgatgtgtgtactcagctaacagagtggaacctttctttttacagagcagctttgaaactctattgttgtggattctgcaaattgatatttagattgctttaacgatatcgttggaaaagggaataccgtcatacaaaatcctagacagaagtattctcacaaacttctttgtgatgtgtgtcctcaactaacagagttgaacctttcttttgatgcagcaatttggaaacacccttttggtagaaactgtaactggatatttggatagctctaacgatttcgttggaaacgggaatatcatcacctaaaatctagacagaagcactattagaaactacttggtgatatctgcattcaagtcacagagtagaacattcccttacttcgagcacgtttgaaacactcttttggaagaatctggaagtggacatttggagcgctttgatgcctttggtgaaaaggaaacgtcttccaataaaagccagacagaagcattctcagaaacttgtttgtgatgtgtgtactcaactaaaagagttgaacctttctattgatagagcagttttgaaacactctttttgtggattctgcaagtggatatttggattgctttgaggatttcgttggaagcgggaattcatataaaaactagacagcagcattcccagaaatttctttcggatatttccattcaactcatagagattaacatggcctttcatagagcaggtttgaaacactctttttgtagtttgtggaagtggacatttcgatcgccttgacgcctaccgtgaaaaaggaaatatcttcccataaaaaatagacagaagcattctcagaaacttgttggtgatatgtgtcctcaactaacagagttgaactttgccattgatagagagcagttttgaaacactctttttcctgaatctgcaagtggatatttggatagcttggaggatttcgttggaagcgggaattcaaataaaaggtagacagcagcattctcagaaatttctttctgatctctgcattcaactcatagagttgaacatttcctttcatagggcaggtttgaaatactctttctgtagtatctggatgtggacatttggagcgctttgatgcctacggtgaaaaagtaaatatcttcccataaaaacgagacagaaggattctgagaaacaagtttgtgatgtgtgtactcagctaacagagtggaacctctcttttgatgcagtagtttggaaacactctttttgtagaaactgtaagtggatatttggatagctctaatgatttcgttggaaacgggaatatcatcatctaaaatctcgacagaatcagtctcagaaactactttgtgatatctgcattccagtcacagagttgaaaactcccttacttagagcaggtttgaaacactctttttgtagaatctggaagtggacatttggagcgctttgatgcatttggtgaaaaaggaaatgtcttcccttaaaaagtagacagaagcattctcagaaacttgtttgtgatgtgtgcacccagctaaaggagttgaacatttattgatagagcagttttgaagcactctttttgtggaaaatgcaagtggatatttggatagcttggaggatttcgttggaagcgggagttcaaataaaaggtagacagcaaggattctgagaaacaagtttgtgatgtgtgtactcagctaacagagtggaacctttctttttacagagcagctttgaaactctatttttgtggattctgcaaatggatatttagattcctttaacgatatcgttggaaaagggaatatcgtcatacaaaatctagacagaagcattctcagaaacttctttgtgatgtgtgtcctcaactaacagagttgaacatttcttttgatgcagcagtttggaaacactctttttgtagaaactgtaagtggatatttggatagctctaacgatttcatttgaaacgggaatatcatcatctaaaatctagacagaagcactattagaaactacttggtgatatcggcattcaagtcacagagttgaacattcccttactttgagcacgtttcaaacactcttttggaagaatctggaagtggacatttggagcgctttgatgcctttggtgaaaaggaaacgtcttccaataaaagccagacagaagcattctcagaaacttgtttgtgatgtgtgtactcaactaaaagagttgaacctttctattgatagagcagttttgaaacactctttttgtggattctgcaagtggatatttggattgctttgaggatttcgttggaagcgggaattcgtataaaaactagacagcagcattcccagaaatttctttcggatatttccattcgattcatagagatgaacatggcctttcatagagcaggtttgaaacactctttttgtagtttgtggaagtggacatttcgatcgccttgacgcctacggtgaaaaaggaaatatcttcccataaaaaatagacagaagcattctcagaaacttgttggtgatatgtgtcctcaactaacagagttgaactttgccattgatagagagcagttttgaaacactctttttgtggaatctgcaagtggatatttggatagcttggaggatttcgttggaagcgggaattcaaataaaaggtagacagcagcattctcagtaaatttctttctgatgtctgcattcaactcatagtagttgaagattccctttcatagagcaggtttgaaacactctttctggagtatctggatgtggacatttggagcgctttgatgcctacggtgaaaaagtaaatatcttcccagaaaaacgagacagaaggattctcagaaacaagtttgtgatgtgtgtactcagctaacagagtggaaactttctttttacagagcagctttgaaactctatttttgtggattctgcaaattgatatttagattgctttaacgatatcgttggaaaagggaatatcgtcatacaaaatctagacagaagcattctcacaaacttctttgtgacgtgtgtcctcaactaacagagttgaacctttcttttgatgcagcagtttggaaacactgtttctgtagcaactgtaagtggatatttggatagctctaacgatttcgttggaaacgggaatatcatcatctaaaatctagacagaagcactattagaaactacttggtgatatctgcattcaagtcacagagttgaacattcccttactttgagcacgtttcaaacactcttttggaagaatctggaagtggacatttggagcgctttgatgcctttggtgaaaaggaaacgtcttccaataaaagccagacagaagcattctcagaaacttgtttgtgatgtgtgtactcaactaaaagagttgaacctttctattgatagagcagttttgaaacactctttttgtggattctgcaagtggatatttggattgctttgaggatttcgttggaagcgggaattcgtataaaaactagacagcagcattcccagaaatttctttcggatatttccattcgactcatagagatgaacatggcctttcatagagcaggtttgaaacactctttttgtagtttgtggaagtggacatttcgatcgccttgacgcctacggtgaaaaaggaaatatcttcccataaaagatagacagaagcattctcagaaacttgttggtgatatgtgtcctcaactaacagagttgaactttgccattgatagagagcagttttgaaacactctttttgtggaatctgcaagtggatatttggatagcttggaggatttcgttggaagcgggaattcaaataaaaggtagacagcagcattctcagaaatttctttctgatgtctgcattcaactcatagagttgaagattccctttcatagaggaggtttgaaacactctttctggagtatctggatgtggacatttggagcgctttgatgcctacggtgaaaaagtaaatatcttcccataaaaacgagacagaaggattctgagaaacaagtttgtgatgtgtgtactcagctaacagagtggaacctctcttttgatgcagcagtttggaaacactctttttgtagaaactgtaagtggatatttggatagctctaatgatttcgttggaaacgggaatatcatcatcttaaatctagacagaagcactctcagaaactactttgtgatatctgcattcaagtcacagagttgaacattcggtttcttagagcacgttggaaacactctttttgtagtgtctggaagtggacatttggagcgctttgatgcctttggtgaaaaagggaatgtcttcccataaaaactagacagaagcattctcagaaacttgtttgtgctgtgtctacccagctaaaggagttgaacatttctattgatagagcagttttgaaacactctttttgtggaaaatgcaggtggatatttggatagcttggaggatttcgttggaagcggggattcaaataaaaagtagacagcagcattctcagaaatttctttctgatgtctgcattcaactcatagagttgaagattctctttcatagagcaggtttgaaacactcgttctggagtatctggatgtggacatttggagcgctttgatgcctacggtggaaaagtaaatatcttcccataaaaacgagacagaaggattctgagaaacaggtttgtgatgtgtgtactcagctaacagagtggaacctttctttttacagagcagctttgaaactctatttttgtggattctgcaaatggatatttagattgctttaatgatatcgctggaaaagggaatatggtcatacaaaatctagacagaagcattctcacaaacttctttctgatgtgtgtcctcaactaacagagttgaacctttcttttgatgcagcagtttggaaacactctttttgtagaaactgtaagtggatatttggatagctctaacgatttcgttggaaacgggaatatcatcatctaaaatctagacagaagccctctcagaaactactttgtgatatctgcattcaagtcacagagttgaacattcgctttcttagagcacgtttgaaacactctttttgtagtgtctggaagtggacatttggagcgctttgatgcctttggtgaaaaaggggaacgtcttcccataaaaactagacagaagcattctcagaaacttgtttgtgatgtgtgtacccagccaaaggagttgaacatttctattgatagagcagttttgaaacactcttgttgtggaaaatgcaagtggatatttggatagcttggaggatttcgttggaagcgggaattcaaataaaaggtagacagcagcattctcagaaatttctttctgatgtctgcattcaactcatagagttgaagattccctttcatagagcaggtttgaaacactcgttctggagtatctggatgtggacatttggagcgcttcgatgcctacggtggaaaagtaaatatcttcccataaaaacgagacagaaggattctcagaaacaagtttgtgatatgtgtactcagctaacagagtggaacctttctttttacagagcagctttgaaactctatttttgtggattctgcaaattgatatttagattgctttaacgatatcgttggaaaagggaatatcgtcatacaaaatctagacagaagcattctcacaaacttctttgtgatgtgtgtcctcaactaacagagttgaacctttcttttgatgcagcaatttggaaacacccttttggtagaaactgtaagtggatatttggatagctctaacgatttcgttggaaacgggaatatcatcatctaaaatctagacagaagcactattagaaactacttggtgatatctgcattcaagtcacagagtagaacattcccttacttcgagcacgtttgaaacactcttttggaagaatctggaagtggacatttggagcgttttgatgcctttggtgaaaaggaaacgtcttccaataaaagccagacagaagcattctcagaaacttgttggtgatgtgtgtactcaactaaaagagttgaacctttctattgatagagcagttttgaaacactctttttgtggattctgcaagtggatatttggattgctttgaggatttcgttggaagcgggaattcatataaaaactagacagcagcattcccagaaatttctttcggatatttccattcaactcattgagatgaacatcgcctttcatagagcaggtttgaaacactctttttgtagtttgtggaagtggacatttcgatcgccttgacgcctacggtgaaaaaggaaatatcttcccataaaaaatagacagaagcattctcagaaacttgttggtgatatgtgtcctcaactaacagagttgaactttgccattgatagagagcagttttgaaacactctttttgtggaatctgcaagtggatatttggatagcttggaggatttcgttggaagcgggaattcaaataaaaggtagacagcagcattctcagaaatttctttctgatgtctgcattcaactcatagagttgaagattccttttcatagagcaggtttgaaacactctttctggagtatctggatgtggacatttggagcgctttgatgcctacggtgaaaaagtataatcttcccataaaaacgagacagaaggattctgagaaacaagtttgtgatgtgtgtactcagctaacagagtggaacccctcttttgatgcagcagtttggaaacactctttttgtagaaactgtaagtggatatttggatagctctaatgatttcgttggaaacgggaatatcatcatctaaaatctagacagaagccctctcagaaactactttgtgatatctgcattcaagtcacagagttgaacattcggtttcttagagcacgttggaaacactctttttgtagtgtctggaagtggacatttggagcgctgtgatgcctttggtgaaaaagggaatgtcttcccataaaaactagacagaaagcattctcagtaaacttgtttgtgatgtgtgtacccagctaaaggagttgaacatttctattgatagagcagttttgaaacactctttttgtggaaaatgcaagtggatatttggatagcttggaggatttcgttggaagcgggaattcaaataaaaggtagacagcagcattctcagaaatttctttctgatgtctgcattcaactcatagagttgaagattccctttcatagagcaggtttgaaacactctttctggagtatctggatgtggacatttggagcgctttgatgcctacggtgaaaaagtaaatatcttcccataaaaacgagacagaaggattctcagaaacaagtttgtgatgtgtgtactcagctaacagagtggaacctttctttttacagagcagctttgaaactctatttttgtggattctgcaaatggatatttagattgctttaatgatatcgctgggaaagggaatatggtcatacaaaatactagacagaagcattctcacaaacttctttgtgatgtgtgtcctcaactaacagagttgaacctttcttttgatgcagcaatttggaaacacccttttggtagaaactgtaactgtatatttggatagctctaacgattccgttggaaacgggaatatcatcatctaaaatctagacagaagcactattagaaactacttggtgatatctgcattcaagtcacagagttgaacattcccttactttgagcacgtttgaaacactcttttggaagaatctggaagtggacatttggagcgctttgatgcctttggtgaaaaggaaacgtcttccaataaaagccagacagaagcattctcagaaacttgttcgtgatgtgtgtactcaactaaaagagttgaacctttctattgatagagcagttttgaaacactctttttgtggattctgcaagtggatatttggattgctttgaggatttcgttgtaagcgggaattcgtataaacactagacagccagcattcccagaatttctttcggatatttccattcaactcatagagatgaacatggcctttcatagagcaggtttgaaacactctttttgtagtttgtggaagtggacatttcgatcgccttgacgcctacggtgaaaaaggaaatatcttcccataaaaaatagacagagcattctcagaaacttgttggtgatatgtgtcctcaactaacagagttgaactttgccattgatagagagcagttttgaaacactctttttcctgaatctgcaagtggatatttggatagtttggaggatttcgttggaagcgggaattcaaataaaaggtagacagcagcattctcagaaatttctttctgatgtctgcattcaactcatagagttgaacattccctttcatagggcaggtttgaaatactctttctgtagtatctggatgtggacatttggagcggtttgatgcctacggtgaaaaagtaaatatcttcccataaaaacgagacagaaggattctgagaaacaagtttgtgatgtgtgtactcagctaacagagtggaacctctgttttgatgcagcagtttggaaacactctttttgtagaaactgtaagtggatatttggatagctctaatgatttcgttggaaacgggaatatcatcatctaaaatctagacagaagcagtctcagaatctactttgtgatatctgcattccagtcacagagttgaaaactcccttacttagaggaggtttgaaacactctttttgtagaatctggaagtggacatttggagcgctttgatgcctttggtgaaaaaggaaacgtcttcccttaaaaagtagacagaagcattctcagaaacttgtttgtgatgtgtgcacccagctaaaggagttgaacatttattgatagagcagttttgaagcactctttttgtggaaaatgcaagtggatatttggatagcttggaggatttcgttggaagcgggagttcaaataaaaggtagacagcagcattctcagaaatttctttctgatgtctgcattcaactcatagagttgaagattccctttcatagagcaggtttgaaacgctctttctggagtatctggatgtggacatttggagcgctttgatgcctacggtgaaaaagtaaatatcttcccataaaaacgagacagaaggattctcagaaacaagtttgtgatgtgtgtactcagctaacagagtggaacctttctttttacagagcagctttgaaactctatttttgtggattctgcaaatggatatttagattgctttaacgatatcattggaaaagggaatatcgtcatacaaaatctggacagaagcattctcacaaacttctttgtgatgtgtgtcctcaactaacagagttgaacctttcttttgatgcagcagtttggaaacacccttttggtagaaactgtaagtggatatttggatagctctaacgatttcgttggaaacgggaatatcatcatctaaaatctagacagaagcactattagaaactacttggtgatatctgcattcaagtcacagagttgaacattcccttactttgagcacgtttcaaacactcttttggaagaatctggaagtggacatttggagcgctttgatgatgcctttggtgaaaaggaaacgtcttccaataaaagccagacagaagcattctcagaaacttgtttgtgatgtgtgtactcaactaaaagagttgaacctttctattgatagagcagttttgaaacactctttttgtggattctgcaagtggatatttggattgctttgaggatttcgttggaagcaggaattcgtataaaatctagacagcagcattcccagaaatttctttctgatatttccattgaactcatagagatgaacatggcctttcatagagcaggtttgaaacactctttttgtagtttgtggaagtggacatttcgatcgccttgatgactacggtgaaaaaggaaatatcttcccataaaaaatagacagaagaattctcagaaactttttgtgatgtgtatcctcaactgacagagttgaaccttgccattgatagagcagttttgaaacactctttttgtggaatctgcaagtggatatttggatagcctggaggatttcgttggaagcgggaattcaaatgaaaggtagacagcagcattctcagaaatttctttgtgatgtttgcattcaactcatagagttgaacattccctttcatagagcaggtttgaaacactctttctgtactatctggatgtggacatttggaacgctttgatgcctacggtgaaaaagtaaatatcttcccataaaaattagacagaaggattctgagaaacaagtttgtgatgtgtgtactcagctaacagagtggaacctttctttttacagagcagctttgaaactctatttttgtggattctgcaaatggatatttagattgctttaatgatatcgttggaaaagggaatatcgtcatacaaaatctagacagaaagcattctcacaaacttctttgtgatgtgtgtcctcaactaacagagttgaacctttcttttgatgcagcaatttggaagcacccttttggtagaaactgtaactggatatttggatagctctaacgatttcgttggaaacgggaatatcatcatctaaaatgtagacagaagcactattagaaactacttggtgatatctgcatttaagtcacagagttgaacattcccttactttgagcacgtttcaaacactcttttggaagaatctggaagtggacatttggagcgctttgatgcctttggtgaaaaggaaacgtcttccaataaaagccagacagaagcattctcagaaacttgtttgtgatgtgtgtactcaactaaaagagttgaacctttctattgatagagcagttttgaaacactctttttgtggattctgcaagtggatatttggattgctttgaggatttcgttggaagcgggaattcgtataaaaactagacagcagcattcccagaaatttctttcggatatttccattcgactcatagagatgaacatggcctttcatagagcaggtttgaaacactctttttgtagtttgtggaagtggacatttcgatcgccttgacgcctacggtgaaaaaggaaatatcttcccataaaaaatagaccagaagcattctcagaaacttgttggtgatatgtgtcctcaactaacagagttgaactttgccattgatagagagcagttttgaaacactctttttgtggaatctgcaagtggatatttggatagcttggaggatttcgttggaagcgggaattcaaataaaaggtagacagcagcattctcagaaatttctttctgatgtctgcattcaactcatagagttgaacattccctttcatagagcaggtttgaaacactctttctggagtatctggatgtgtacatttggagcgctttgatgcctacggtgaaaaagtaaatatcttcccataaaaacgagacagaaggattctgagaaacaagtttgtgatgtgtgtactcagctaacagagtggaacctctcttttgatgcagcagtttggaaacactctttttgtagaaactgtaagtggatatttggatacctctaatgatttcgttggaaacgggaatatcatcatctaaaatctagacagaagcactctcagaaactactttgtgatatctgcattcaagtcacacagttgaacattcgctttcttagagcacgtttgaaacactctttttgtagtgtctggaagtggacatttggagcgctttgattcctttggtgaaaaagggaatgtctacccataaaaactagacagaagcattctcagaaacttgtttgtgatgtgtgtacccagccaaaggagttgaacatttctattgatagagcaggtttgaaacactctttttgtggaaaatgcaggtggatatttggatagcttggaggatttcgttggaagcgggaattcaaataaaaggtagacagcagcattctcagaaattcccttctgatgtctgcattcaactcatagagttgaagactccctttcatagagcaggtttgaaacactctttctggagtatctggatgtggacatttggagcgctttgatgcctacggtgaaaaagtaaatatcttcccataaaaacgagacagaaggattctcagaaagaagtttgtgatgtgtgtactcagctaacagagtggaacctttctttttacagagcagctttgaaactctatttttgtggattctgcaaattgatatttagattgctttaacgatatcgttggaaaagggaatatcgtcatacaaaatactagacagaagcattctcacaaacttctttgtgatgtgtgtcctcaactaacagagttgaacctttcttttgatgcagcaatttggaaacacccttttggtagaaactgtaactggatatttggatagctctaacgatttcgttggaaacgggaatatcatcatctaaaatgtagacagaagcactattagaaactacttggtgatatctgcattcaagtcacagagttgaacattcccttactttgagcacgtttgaaacactcttttggaagaatctggaagtggacatttggagcgctttgatgcctttggtgaaaaggaaacttcttccaataaaagccagacagaagcattctcagaaacttgttcgtgatgtgtgtactcaactaaaagagttgaacctttctattgatagagcagttttgaaacactctttttgtggattctgcaagtggatatttggattgctttgaggatttcgttggaagcgggaattcgtataaacactagacagcagcattcccagaaatttctttcggatatttccattcaactcatagagatgaacatggcctttcatagagcaggtttgaaacactctttttgtagtttgtggaggtggacatttcgatcgccttgacacctacggtgaaaaaggaaatatcttcctataaaaaatagacagaagcattctcagaaacttgttggtgatatgtgtcctcaactaacagagttgaactttgccattgatagagagcagttttgaaacactctttttgtggaatctgcaagtggatatttggatagcttggaggatttcgttggaagcgggaattcaaataaaaggtagacagcagcattctcagaaatttctttctgatgtctgcattcaactcatagagttgaacattccctttcatagagcaggtttgaaacactctttctggagtatctggatgtggacatttggagcgctttattgcctacggtgaaaaagtaaatatcttcccataaaaacgagacagaaggattctgagaaacaagtttgtgatgtgtgtactcagctaacagagtggaacctctgttttgatgcagcagtttggaaacactctttttgtagaaactgtaagtggatatttggatagctctaatgatttcgttggaaacgggaatatcatcatctaaattctagacagaagccctctcagaaactactttgtgatatctgcattcaagtcacagagttgaacattcgctttcttagagcacgtttgaaacactctttttgtagtgtctggaagtggacatttggagcgctttcatgcctttggtgaaaaagggaatgtcttcccataaaaactagacagaagcattctcagaaacttgtttgtgatgtgtgtacccagctaaagagttgaacatttgtattgatagagcagttttgaaacactctttttgtggaaaatgcaagtggatattttgatagcttggaggatttcgttggaagcgggaattcaaataaaaggtagacagcagcattctcagaaatttctttctgatgtctgcattcaactcatagagttgaagattccctttcctagagcaggtttgaaacactctttctggagtatctggatgtggacatttggagcgctttgatgcctacggtgaaaaagtaaatatcttcccataaaaacgagacagaaggattctcagaaacaagtttgtgatgtgtgtactcagctaacagagtggaacctttctttttacagagcagctttgaaactctatttttgtggattctgcaaattgatatttagattgctttaacgatatcgttggaaaagggaatatcgtcatacaaaatcctagacagaagcattctcacaaacttctttgtgatgtgtgtcctcaactaacagagttgaacctttcttttgatgcagcagtttggaacaccctttttgtagaaactgtaagtggatatttggatagctctaacgatttcgttggaaacgggaatatcatcatctaaaatctagagagaagcagtattagaaactacttggtgatatctgcattcaagtcacagagttgaacattcccttactttgagcacgtttcaaacactcttttggaagaatctggaagtggacatttggagcgctttgatgatgcctttggtgaaaaggaaacgtcttctaataaaagccagacagaagcattctcagaaacttgtttgtgatgtgtgtactcaactaaaagagttgaacctttctattgatagagcagttttgaaacactctttttgtggattctgcaagtggatatttggattgctttgaggatttcgttggaagcgggaattcgtataaaaactagacagcagcattcccagaaatttctttcggatatttccattcaactcatagagatgaacatggcctttcatagagcaggtttgaaacactctttttgtagtttgtggaggtggacatttcgatcgccttgacgcctacggtgaaaaaggaaatatcttcctataaaaaatagacagaagcattctcagaaacttgttggtgatatgtgtcctcaactaacagagttgaactttgccattgatagagagcagttttgaaacactctttttgtggaatctgcaagtggatatttggatagcttggaggatttcgttggaagcgggaattcaaataaaaggtagacagcagcattctcagaaatttctttctgatgtctgcattcaactcatagagttgaagattccctttcatagagcaggtttgaaacactctttctggagtatatggatgtggacatttggagcgctttgatgcctgcggtgagaaagtaaatatcttcccataaaaacgagacagaaggattctgagaaacaagtttgtgatgtgtgtactcagctaacagagtggaacctctcttttgatgcagtagtttggaaacacactttttgtagaaactgtaagtggatatttggatagctctaatgatttcgttggaaacgggaatatcatcatctaaaatctagacagaagccctgtcagaaactactttgtgatatctgcattcaagtcacagagttgaacattcgctttcttagagcacgtttgaaacactctttttgtagtgtctggaagtggacatttggagtgctttgatgcctttggtgaaaaagggaatgtcttcccataaaaactagacagaagcattctcagaaacttgtttgtgatgtgtgtacccagccaaaggagttgaacatttctattgatagagcagttttgaaacactcttgttgtggaaaatgcaggtggatatttggatagcttggaggatttcgttggaagcgggaattcaaataaaggtagacagcaacattctcagaaatttctttctgatgtgtgcattcaactcatagagttgaagattccctttcatagagcaggtttgaaacactctttctggagtatctggatgtggacatttggaccgctttgatgcctacggtgaaaaactaaatatgttcccataaaaacgagacagaaggattctcagaaacaagtttgtgatgtgtgtactcagctaacagagtggaacctttctttttacagagcagctttgaaactctattcttgtggattctgcaaatggatatttagattgctttaatgatatcgctggaaaagggaatatggtcatacaaaatctagacagaagcattctcacaaacttctttgtgatgtgtgtcctcaactaacagagttgaacctttcttttgatgcagcagtttggaaacactctttttgtagaaactgtaagtggatatttggatagctctaacgattgcgttggaaacgggaatataatcatctaaaatctagacagaagcactattagaaactacttggtgatatctgcattcaagtcaaagagttgaacattcccttactttgagcacgtttgaaacactcttttggaagaatctggaagtggacatttggagcgctttgatgcctttggtgaaaaggaaacgtcttccaataaaagccagacagaagcattctcagaaacttgttcttgatgtgtgtactcaactaaaagagttgaacctttctattgatagagcagttttgaaacactctttttgtggattctgcaagtggatatttggattgctttgaggatttctttggaagcgggaattcgtataacaactagacagcagcattcccagaaatttctttcggatatttccattcaactcatagagatgaacatggcctttcatagagcaggtttgaaacactctttttgtagtttgtggaagtggacatttcgatcgccttgacgcctacggtgaaaaaggaaatatcttcccataaaaaatagacagaagcattctcagaaacttgttggtgatatgtgccctcaactaacagagttgaactttgccattgatagagagcagttttgaaacactctttttgtggaatctgcaagtggatatttggatagcttggaggatttcgttggaagcgggaattcaaataaaaggtagacagcagcattctcagaaatttctttctgatgtctgcattcaactcatagagttgaacattccctttcatagagcaggtttgaaatactctttctgtagtatctggatgtggacatttggagcgctttgatgcctatggtgaaaaagtaaatatcttcccattaaaacgagacggaaggattctgagaaacaagtttgtgatgtgtgtactcagctaacagagtggaaatctcttttgatgcagcagtttcgaaacactctttttgtagaaactgtaagtggatatttggatagctctaatgatttcgttggaaacgggaatatcatcatctaaaatctagacagaagcactctcagaaactactgtgtgatatctgcattcaagtcacagagttgaacattcgctttcgtagagcacgtttgaaacactctttttgtattggctggaagtggacatttggagcgctttgattcctttggtgaaaaagggaatgtctacccataaaaactagacagaagcgttctcagaaacttgtttgtgatgtgtgtacccagctaaaggagttgaaagtttctattgatagagcagttttgaaacactctttttgtggaaaatgcaagtggatgtttggatagctaggaggatttcgttggaagcgggaattcaaataaaaggtagacagcaggattctgagaaacaagtttgtgatgtgtgtactcagctaacagagtggaacctttctttttacagagcagctttgaaactctatttttgtggattctgcaaattgatatttagattgctttaacgatatcgttggaaaagggaatatcctcatacaaaatctagacagaagcactctcagaaactactttgtgatatctgcattcaagtcacagagttgaacattcgctttcttagagcacttttgaaacactctttttgtagtatctagaagtggacatttggagctctttgatgcctttggtgaaaaaggaaatgtcttcccataaaaactagacagaagcattctcagaaacttgtttgtgatgtgtgcacccagctaaaggagttgaacatttattgatagagcagttttgaagcactctttttgtggaaaatgcaagtggatatttggatagcttggaggatttcgttggaagcgggagttcaaataaaaggtagacagcagcattctcagaaatttctttctgatgtctgcattcaactcatagagttgaagattccctttcatagagcaggtttgaaacactctttctggagtatctggatgtggacatttggagcgctttgatgcctacggtgaaaaagtaaatatcttcccataaaaacgagacagaaggattctcagaaacaagtttgtgatgtgtgtactcagctaacagagtggaacctttctttttacagagcagctttgaaactctatttttgtggattctgcaaattgatatttaggttgctttaacgatatcgttggaaaagggaatatcgtcatacaaaatctagacagaagcattctcacaaacttctttgtgatgtgtgtcctcaactaacagagttgaacctttcttttgatgcagcaatttggaaacacccttttggtagaaactgtaactggatatttggatagctctaacgatttcgttggaaacgggaatatcatcatctaaaatctagacagaagcactattagaaactacttggtgatatctgcattcaagtcacagagttgaacattcccttactttgagcacgtttgaaacactcttttggaagaatctggaagtggacatttggagcgctttgatgcctttggtgaaaaggaaacgtcttccaataaaagccagacagaagcattctcagaaacttgttcgtgatgtgtgtactcaactaaaagagttgaacctttctattgacagagcagttttgaaacactctttttgtggattctgcaagtggatatttggattgctttgaggatttcgttggaagcgggaattcgtataaacactagacagcagcattcccagaaatttctttcggatatttccattcgactcatagagatgaacatggcctttcatagagcaggtttgaaacactctttttgtagtttgtggaagtggacatttggagcgctttgatgcctttggtgaaaaagggaatgtcttcccataaaaactagacagaagcattctcagaaacttgttggtgatatgtgtcctcaactaacagatttgaactttgccattgatagagagcagttttgaaacactctttttgtggaatctgcaagtggatatttggatagcttggaggatttcgttggaagcgggaattcaaataaaaggtagacagcagcattctcagaaatttctttctgatgtctgcattcaactcatagagttgaatattccctttcatagagcaggtttgaaacactctttctggagtatctggatgtggacatttggagcgctttgatgcctacggtgaaaaagtaaatatcttcccataaaaacgacacagaaggattctcagaaacaagtttgtgatgtgtgtactcagctaacagagtggaacctctcttttgatgcagcagtttggaaacactctttttgtagaaactgtaagtggatatttggatagctctaatgatttcgttggaaacgggaatatcatcatctaaaatctagacagaagccctctcagaaactactttgtgatatctgcattcaagtcacagagttgaacattcgctttcttagagcacgttggaaacactctttttgtagtgtctggaagtggacatttggagcgctttgatgcctttggtgaaaaagggaatgtcttcccataaaatctagacagaaagcattctcagaaacttgtttgtgatgtgtgcacccagctaaaggagttgaacatttattgatagagcagttttgaagcactctttttgtggaaaatgcaagtggatatttggatagcttggaggatttcgttggaagcgggagttcaaataaaaggtagacagcagcattctcagaaatttctttctgatgtctgcattcaactcatagagttgaagattccctttcatagagcaggtttgaaacactctttctggagtatctggatgtggacatttggagcgctttgatgcctacggtgaaaaagtaaatatcttcccataaaaacgagacagaaggattctgagagacaagtttgtgatgtgtgtactcagctaacagagtggaacctttctttttacagagcagctttgaaactctatttttgtggattctgcaaatggatatttagattgctttaacgatatcgctggaaaagggaatatggtcatacaaaatctagacagaagcattctcacaaacttctttgtgatgtgtgtcctcaactaacagagttgaacttttcttttgatgcagcagtttggaaacactgtttttgtagaaactgtaagtggatatttggatagctctaacgatttcgttggaaacgggaatatcatcatctaaaatctagacagaagcactattagaaactacttggtgatatctgcattcaagtcacagagttgaacattcccttactttgagcacgtttgaaacactcttttggaagaatctggaagtggacatttggagcgctttgatgcctttggtgaaaaggaaacgtcttccaataaaagtcagacagaagcattctcagaaacttgttcttgatgtgtgtactcaactaaaagagttgaacctttctattgatagagcagttttgaaacactctttttgtggattctgcaagtggatatttggattgctttgaggatttcgttggaagcgggaattcgtataaaaactagacagcagcattcccagaaatttctttcggatatttccattcaactcatagagatgaacatggcctttcatagagcaggtttgaaacactctttttgtagtttgtggaagtggacatttcgatcgccttgacgcctacggtgaaaaaggaaatatcttcccataaaaaatagacagaagcattctcagaaacttgttggtgatatgtgtcctcaactaacagagttgaactttgccattgatagagagcagttttgaaacactctttttgtggaatctgcaagtggatatttggatagcttggaggatttcgttggaagcgggaattcaaataaaaggtagacagcagcattctcagaaatttctttctgatgtctgcattcaactcatagagttgaagattccctttcatagagcaggtttgaaacactctttctggagtatctggatgtggacatttggagcgctttgatgtctacggtggaaaagtaaatatcttcccataaaaacgagacagaaggattctgagaaacaagtttgtgatgtgtgtactcagctaacagagtggaacctctgttttgatgcagcagtttggaaacactctttttgtagaaactgtaagtggatatttggatagctctaatgatttcgttggaaacgggaatatcatcatctaaaatctagacagcagccctctcagaaactactttgtgatatctgcattcaagtcacagagttgaacattcgttttcttagagcacgtttgaaacactctttttgtagtgtctggaagtggacatttggagcgctttgatgcctttggtgaaaaagggaacgtcttcccataaaaactagacagaagcattctcagaaacttgtttgtgatgtgtgtacccagccaaaggagttgaacatttctattgatagagcagttttaaaacactcttgttgtggaaaatgcaagtggatatttggatagcttggaggatttcgttggaagcgggaattcaaataaaaggtagacagcagcattctcagaaatttctttctgatgtctgcattcaactcatagagttgaagattccctttcatagagcaggtttgaaacactcgttctggagtatctggatgtagacatttggagcgctttgatgcctacggtggaaaagtaaatatcttcccataaaaacgagacagaaggattctcagaaacaagttttttatgtgtgtactcagctaatagagtggatcctttctttttacagagcagctttgaaactctatttctgtggattctgcaaattgatatttgggttgatttaatgacatcgttggaaaagggaatatcttcatacaaaatctagacagaagcattttcacaaacttctttgtgatgtgtgtcctcaactaacagagttgaacctttcttttgatgcagcaatttggaaacacccttttggtagaaactgtaactggatatttggatagctctaacgatttcgttggaaacgggaatatcatcatctaaaatgtagacagaagcactattagaaactacttggtgatatctgcattcaagtcacagagttgaacattcccttactttgagcacgtttcaaacactcttttggaagaatctggaagtggacatttggagcgctttgatgcctttggtgaaaaggaaacgtcttccaataaaagccagacagaagcattctcagaaacttgtttgtgatgtgtgtactcaactaaaagagttgaacctttctattgatagagcagttttgaaacactctttttgtggattctgcaagtggatatttggattgctttgaggatttcgttggaagcgggaattcgtataaacactagacagcagcattcccagaaatttctttcggatatttccattcaactcatagagatgaacatggcctttcatagagcaggcttgaaacactctttttgtagtttgtggaagtggacatttcgatcgccttgacgcctacggtgaaaaaggaaatatcttcccataaaaatagacagaagcattctcagaaacttgttggtgatatgtgtcctcatctaacagagttgaactttgccattgatagagagcagttttgaaacactctttttgtggaatctgcaagtggatatttggatagcttggaggatttcgttggaagcgggaattcaaataaaaggtagacagcagcattctcagaaatttctttctgatgtctgcattcaactcatagagttgaagattcccttttatagagcaggtttgaaacactctttctggagtatctggatgtggacatttggagcgctttgatgcctacggtgaaaaagtaaatatcttcccataaaaacgagacagaaggattctcagaaacaagtttgtgatgtctttactcagctaacagagtggaacctctcttttgatgcagcagtttggaaacactctttttgtagaaactgtaagtggatatttggatagctctaatgatttcgttggaaacgggaatatcatcatctaaaatctagacagaagccctctcagaaactactttgtgatatctgcattcaagtcacagagttgaacattcactttcttagagcacgtttgaaacactctttttgtagtgtctggaagtggacatttggagcgctttgatgcctttggtgaaaaggggaatgtcttcccataaaaactagacagaagcattctcagaaacttgtttgtgatgtgtgtacccagctaaaggagttgaacatttctattgatagagcagtcttgaaacactctttttgtggaaaatgcaagtggatatttggatagcttggaggatttcgttggaagcgggaattcaaataaaaggtagacagcagcattctcagaaatttctttctgatgtctgcattcaactcatagagttgaagattctctttcatagagcaggtttgaaacactctttctggagtatctggatgtggacatttggagcgctttgatgcctacggtgaaaaagtaaatatcttcccataaaaacgagacagaaggattctcagaaacaagtttgtgatgtgtgtactcagctaacagagtggaacctttctttttacagagcagctttgaaactctatttttgtggattctgcaaatggatatttagattgctttaacgatatcgttggaaaagggaatatcgtcatacaaaatctggacagaagcattctcacaaacttctttgtgatgtgtgtcctcaactaacagagttgaacctttcttttgatgcagcagtttggaaacactctttttgtagaaactgtaagtggatatttggatagctctaacgatttcgctggaaacgggaatatcgtcatctaaaatctagacagaagcactattagaaactacttggtgatatctgcattcaagtcacagagttgaacattcccttactttgagcacgtttgaaacactcttttggaagaatctggaagtggacatttggagcgctttgatgcctttggtgaaaaggaaacggcttccaataaaagccagacagaagcattctcagcaaacttgtttgtgatgtgtgtactcaactaaaagagttgaacctttctattgatagagcagttttgaaacactctttttgtggattctgcaagtggatatttggattgctttgaggatttcgttggaagcgggaattcgtataaaaactagacagcagcattcccagaaatttctttcggatatatccattcaactcatagagatgaacatggcctttcatagagcaggtttgaaacactctttttgtagtttgtggaagtggacatttcgatcgccttgacgcctacggtgaaaaaggaaatatcttcccataaaaaatagacagaagcattctcagaaacttgttgttgatatgtgtcctcaactaacagagttgaactttgccattgatagagagcagttttgaaacactctttttgtggaatctgcaagtggatatttggatagcttggaggatttcgttggaagcgggaattcaaataaaaggtagacagcagcattctcaggaatttctttctgatgtctgcattcaactcatagagttgaagattccctttcatagagcaggtttgaaacactctttgtggagtatctggatgtggacatttggagcgctttgatgcctacgttgaaaaagtaaatatcttcccataaaaacgagacagaaaggattctgagaaacaagtttgtgatgtgtgtactcagctaacagagtggaacctctcttttgatgcagcagtttggaaacactctttttgtagaaactgtaagtggatatttggatagctctaatgatttcgttggaaacgggaatatcatcgtctaaaatctagacagaagccctctcagaaactactgtgtgatatctgcattcaagtcacagagttgaacattcgctttcttagagcacgtttgaaacactctttttgtagtgtctggaagtggacatttggagcgctttgattcctttggtgaaaaagggaatgtctacccataaaaactagacagaagcattttcagaaacttgtttgtgatgtgtgtacccagccaaaggagttgaacatttctattgatagagcagttttgaaacactctttttgtggaaaatgcaggtggatatttggatagcttggaggatttcgttggaagcgggaattcaaataaaaggtagacagcagcattctcagaaatttctttctgatgtctgcattcaactcatagagttgaagattccctttcatagagcaggtttgaaatactctttctggagtatctggatgtggacatttggagcgctttgatgcctacggtggaaaagtaaatatcttcccataaaaacgagacagaaggattctcagaaacaagtttgtgatgtgtgtactcagctaacagagtggagcctttctttttacagagcagctttgaaactctattttcgtggattctgcaaattgatatttagattgctttaacgatatcgttggaaaagggaatatcgtcatacaaaatctagacagaagcattctcacaaacttctttgtgatgtgtgtcctcaactaacagagttgaacctttcttttgatgcagcaatttggaaacaccctttcggtagaaactgtaactggatatttggatagctctaacgatttcgttggaaacgggaatatcatcacctaaaatctagacagaagcactattagaaactacttggtgatatctgcattcaagtcacagagtagaacattcccttacttcgagcacgtttgaaacactcctttggaagaatctggaagtggacatttggagcgctttgatgcctttggtgaaaaggaaacgtcttccaataaaagccagacagaagcattctcagaaacttgttggtgatgtgtgtactcaactaaaagagttgaacctttctattgatagagcagttttgaaacactctttttgtggattctgcaagtggatatttggattgctttgaggatttcgttggaagcgggaattcatataaaaactagacagcagcattcccagaaatttctttcggatatttccattcaactcatagagatgaacatcgcctttcatagagcaggtttgaaacactctttttgtagtttgtggaagtggacatttcgatcgccttgacgcctacggtgaaaaaggaaatatcttcccataaacaatagacagaagcattctcagaaacttgttggtgatatgtgtcctcaactaacagagttgaactttgccattgatagagagcagttttgaaacactctttttgtggaatctgcaagtggatatttggatagcttggaggatttcgttggaagcgggaattcaaataaaaggtagacagcagcattctcagaaatttctttctgatgtctgcattcaactcatagagttgaagattccctttcatagagcaggtttgaaacactctttctggagtatctggatgtggacatttggagcgctttgatgcctacggtgaaaaagtaaatatcttcccataaaaaagagacagaaggattctgagaaacaagtttgtgatgtgtgtactcagctaacagagtggaacctttctttttacagagcagctttgaaactctatttttgtggattctgcaaattgatatttagattgctttaacgatatcgttggaaaagggaatatcgtcatacaaaacctagacagaagcattctcacaaacttctttgtgacgtgtgtcctcaactaacagagttgaacctttcttttgatgcagcagtttggaaacactgtttttgtagcaactgtaagtggatatttggatagctctaacgattttgttggaaacgggaatatcatcatctaaaatctagacagaagcactattagaaactacttggtgatatctgcattcaagtcacagagttgaacattcccttactttgagcacgtttcaaacactcttttggaagaatctggaagtggacatttggagcgctttgatgcctttggtgaaaaggaaacgtcttccaataaaagccagacagaagcattctcagaaacttgtttgtgatgtgtgtactcaactaaaaagagttgaacctttctattgatagagcagttttgaaacactctttttgtggattctgcaagtggatatttggattgctttgaggatttcgttggaagcgggaattcgtataaaaactagacagcagcattcccagaaatttctttcggatatttccattcgactcatagagatgaacatggcctttcatagagcaggtttgaaacactctttttgtagtttgtggaagtggacatttcgatcgccttgacgcctacggtgaaaaaggaaatatcttcccataaaaaatagacagaagcattctcagaaacttgttggtgatatgtgtcctcaactaacagagttcaactttgccattgatagagagcagttttgaaacactctttttgtggaatctgcaagtggatatttggatagcttggaggatttcgttggaagcgggaattcaaataaaaggtagacagcagcattctcagaaatttctttctgatgtctgcattcaactcatagagttgaagattccctttcatagggcaggtttgaaatactctttctgtagtatctggatgtggacatttggagcgctttgatgcctacggtgaaaaagtaaatatcttcccataaaaacgagacagaaggattctgagaaacaagtttgtgatgtgtgtgctcagctaacagagtggaacctctcttttgatgcagcagtttggaaacactctttttgtagaaactgtaagtggatatttggatagctctaatgatttcgttggaaacgggaatatcatcatctaaaatctagacagaagccctctcagaaactactttgtgatatctgcattcaagtcacagagttgaacattcgctttcttagagcacgtttgaaacactctttttgtagtgtctggaagtggacatttggagcgctttgattcctttggtgaaaaagggaatgtctacccataaaaactagacagaagcattctcagaaacttgtttgtgatgtgtgtacccagccaaaggagttgaacatttctattgatagagcagttttgaaacactctttttgtggaaaatgcaggtggatatttggatagcttggaggatttcgttggaagcgggaattcaaataaaagttagacagcagcattctcagaaatttctttctgatgtctgcattcaactcatagagttgaagattccctttcatagagcaggtttgaaatactctttctgtagtatctggatgtggacatttggagcgctttgatgcctacggtgaaaaagtaaatatcttcccataaaaacgagacagaaggattctcagaaacaagtttgtgatgtgtgtactcagctaacagagtggaacctttctttttacagagcagctttgaaactctatttttgtggattctgcaaattgatatttagattgctttaacgatatcgttggaaaagggaatatggtcatacaaaatctagacagaagcattctcacaaacttctttgtgatgtgtgtcctcaactaacagagttgaacctttcttttgatgcagcagtttggaaacactgtttttgtagcaactgtaagtggatatttggatagctctaacgatttcgttggaaacgggaatatcatcatctaaaatctagacagaaagcactattagaaactacttggtgatatctgcattcaagtcacagagttgaacattcccttactttgagcacgtttcaaacactcttttggaagaatctggaagtggacatttggagcgctttgatgcctttggtgaaaaggaaacgtcttccaataaaagccagacagaagcattctcagaaacttgtttgtgatgtgtgtactcaactaaaagagttgaacctttctattgatagagcagttttgaaacactctttttgtggattctgcaagtggatatttggattgctttgaggatttcgttggaagcgggaattcgtataaaaactagacagcagcattcccagaaatttctttcggatatttccattcaactcatagagatgaacatggcctttcatagagcaggtttgaaacactctttttgtagtttgtggaagtggacatttcgatcgccttgacgcctacggtgaaaaaggaaatatcctcccataaaaaatagacagaagcattctcagaaaacttgttggtgatatgtgtcctcaactaacagagttgaactttgccattgatagagagcagttttgaaacactctttttcctgaatctgcaagtggatatttggatagtttggaggatttcgttggaagcgggaattcaaataaaaggtagacagcagcattctcagaaatttctttctgatgtctgcattcaactcatagagttgaacattccctttcatagggcaggtttgaaatactctttctgtagtatctggatgtggacatttggagcgctttgatgcctacggtgaaaaagtaaatatcttcccataaaaacgagacagaaggattctgagaaactagtttgtgatgtgtgtactcagctaacagagtggaacctctcttttgatgcagtagtttggaaacactctttttgtagaaactggaagtggatatttggatagctctaatgatttcgttggaaacgggaatatcatcatctaaaatctagacagaagccctctcagaaactactttgtgatatctgcattcaagtcacagagttgaacattcgctttcttagagcacgttggaaacactctttttgtagtgtctggaagtggacatttggagcgctttgatgccttggtgaaaaagggaatgtcttcccataaaaactagacagaagcattctcagaaacttgtttgtgatgtgtgtacccagccaaaggagttgaacatttctattgatagagcagttttgaatcactcttgttgtggaaaatgcaggtggatatttggatagcttggaggatttcgttggaagcgggaattcaaataaaaggtagacagcagcattctcagaaatttctttctgatgtctgcattcaactcatagagttgaagattccctttcatagagcaggtttgaaacagtctttctggagtatctggatgtggacatttggagcgctttgatgcctatggtgaaaaagtaaatatcttcccataaaaacgagacagaaggattctgagaaacaagtttgtgatgtgtgtactcagctaacagagtggaacctttctttttacagagcagctttgaaactctatttttgtggattctgcaaattgatatttagattgatttaacgatatcgttggaaaagggaatatcgtcatacaaaatctagacagaagcattctcacaaacttctttgtgatgtgtgtcctcaactaacagagttgaacctttcttttgatgcagcagtttggaaacactctttttgtagaaactgtaagtggatatttggatagctctaacgatttcgttggaatcgggaatatcatcatctaaaatctagacagaagcactattagaaactacttggtgatatctgcattcaagtcaaagagttgaacattcccttactttgagcacgtttgaaacactcttttggaagaatctggaagtggacatttggagcgctttgatgcctttggtgaaaaggaaacgtcttccaataaaagccagacagaagcattctcagaaacttgtttgtgatgtgtgtactcaactaaaagagttgaacctttctattgatagcgcagttttgaaacactctttttgtggattctgcaagtggatatttggattgctttgaggatttcgttggaagcgggaattcgtataaacactagacagcagcattcccagaaatttctttcggatatttccattcaactcatagagatgaacatggcctttcatagagcaggtttgaaacactctttttgtagtttgtggaagtggacatttcgatcgccttgacgcctacgctgaaaaaggaaatatcttcccataaaaaatagacagaagcattctcagaaacttgttggtgatatgtgtcctcaactaacagagttgaactttgccattgatagagagcagttttgaaacactctttttgtggaatctgcaagtggatatttggatagcttggaggatttcgttggaagcgggaattcaaataaaaggtagacagcagcattctcagaaatttctttctgatctctgcattcaactcatagagttgaacattccctttcatagggcaggtttgaaatactctttctggagtatctggatgtggacatttggagcgctttgatgcctacggtgaaaaagtaaatatcttcccataaaaacgagacagaaggattctgagaaacaagtttgtgatgtgtgtactcagctaacagagtggaacctctcttttgatgcagcagtttggaaacactctttttgcagaaactgtaagtggatatttggatagctctaatgatttcgttggaaacgggaatatcatcatctaaaatctagacagaagccctctcagaaactactttgtgatatctgcattcaagtcacagagttgaacattcgctttcttagagcacgttggaaacactctttctgtggtgtctggaagtggacatttggagcgctttgatgcctttggtgaaaaagggaatgtcttcccatgaaaactagacagaagcattctcagaaacttgtttgtgatgtgtgtacccagctaaaagagttgaacatttctattgatagagcagttttgaaacactctttttgtggaaaatgcaagtggatatttggatagcttggaggatttcgttggaagcgggaattcaaataaaaggtagacagcaggattctcagaaacaagtttgtgatgtgtgtactcagctaacagagtggaacctttctttttacagagcagctttgaaactctatttttgtggattctgcaaattgatatttagattgctttaacgatattgttggaaaagggaatatggtcatacaacatctagacagaagcattctcacaaacttctttgtgatgtgtgtcctcaactaacagagttgaacctttcttttgatgcagcagtttggaaacactctttttgtagaaactgtaagtggatatttggatagctctaacgatttcgctggaaacgggaatatcgtcatctaaaatctagacagaagcactattagaaactacttggtgatatctgcattcaagtcaaagagttgaacattcccttactttgagcacgtttgaaacactcttttggaagaatctggaagtggacatttggagcattttgatgcctttggtgaaaaggaaacgtcttccaataaaagccagacagaagcattctcagaaacttgtttgtgatgtgtgtactcaactaaaagagttgaacctttctattgatagagcagttttgaaacactctttttgtggattctgcaagtggatatttggattgctttgaggatttcgttggaagcgggaattcgtataaaaactagacagcagcattcccagaaatttctttcggatatttccattcaagtcatagagatgaacatggcctttcatagagcaggtttgaaacactctttttgtagtttgtggaagtggacatttcgatcgccttgacgcctacggtgaaaaaggaaatatcttcccataaaaaatagacagaagcattctcagaaacttgttggtgatatgtgtcctcaactaacagagttgaactttgccattgatagagagcagttttgaaacactctttttgtggaatctgcaagtggatatttggatagcttggaggatttcgttggaagcgggaattcaaataaaaggcagacagcagcattctcagaaatttctttctgatgtctgcattcaactcatagagttgaagattccctttcatagagcaggtttgaaacactctttctggagtatctggatgtggacatttggagcgctttgatgcctacggtgagaaagtaaatatcttcccataaaaacgagacagaaggattctgagaaacaagtttgtgatgtgtgtactcagctaacagagtggaacctctcttctgatgcagcagtttggaaacactttttttgtagaaactgtaagtggatatttggatagctctaatgatttcgttggaaacgggaatatcatcatctaaaatctagacagaagcactctcagaaactactttgtgatatctgcattcaagtcacagagttgaacattcgctttcttagagcacgtttgaaacactctttttgtagtgtctggaagtggacatttggagcgctttgattcctttggtgaaaaagggaatgtctacccataaaaactacacagaagcattctcagaaacttgtttgtgatgtgtgcacccagctaaaggagttgaacatttattgatagagcagttttgaagcactctttttgtggaaaatgcaagtggatatttggatagcttggaggatttcgttggaagcgggagttcaaataaaaggtagacagcagcattctcagaaatttctttctgatgtctgcattcaactcatagagttgaagattccctttcatagagcaggtttgaaacactctttctggagtatctggatgtggacatttggagcgctttgatgtctacggtgaaaaagtaaatatcttcccagaaaaacgagacagaaggattctgagaaacaagtttgtgatgtgtgtactcagctaacagagtggaacctttctttttacagagcagctttgaaactctatttttgtggattctgcaaattgatatttagattgctttaacgatatcgttggaaaagggaatatcgtcatacaaaatctggacagaagcattctcacaaacttctttgtgatgtgtgtcctcaactaacagagttgaacctttcttttgatgcagcaatttggaaacacccttttggtagaaactgtaactggatatttggatagctctaatgatttcgttggaaacgggaatatcatcatctaaaatctagacagaagcactattagaaactacttggtgatatctgcattcaagtcacagagttgaacattcccttactttgagcacgtttgaaacactcttttggaagaatctggaagtggacatttggagcgctttgatgcctttggtgaaaaggaaacgtcttccaataaaagccagacagaagcattctcagaaacttgtttgtgatgtgtgtactcaactaaaagagttgaacctttctattgatagagcagttttgaaacactctttttgtggattctgcaagtggatatttggattgctttgaggatttcgttggaagcgggaattcgtataacaactagacagcagcattcccagaaatttcttttggatatttccattcaactcatagagatgaacatggcctttcatagagcaggtttgaaacactctttttgtagtttgtggaagtggacatttcgatcgccttgacgcctacggtgaaaaaggaagtatcttcccataaaaaatagacagaagcattctcagaaacttgttggtgatatgtgtcctcaactaacagagttgaactttgccattgatagagagcagttttgaaacactctttttgtggaatctgcaagtggatatttggatagcttggaggatttcgttggaagcgggaattcaaataaaaggtagacagcagcattctcagaaatttctttctgatgtctgcattcaactcatagagttgaagattccctttcatagagcaggtttgaaacactctttctggagtatctggatgtggacatttggagcgctttgatgcctacggtgaaaaagtataatcttcccataaaaacgagacagaaggattctcagaaacaagattttgatgtgtgtactcagctaacagagtggaacctctctttagatgcagcagtttggaaacactctttttgtagaaactgtaagtggatatttggatagctctaatgatttcgttggaaacgggaatatcatcatctaaaatctagacagaagccctctcagaaactactttgtgatatctgcattcaagtcacagagttgaacatccggtttcttagagcacgtttgaaacactctttttgtagtgtctggaagtggacatttgtagcgctttgatgcctttggtgaaaaagggaatgtcttcccataaaaactagacagaagcattctcagaaacttgtttgtgatgtgtgtacccagccaaaggagttgaacatttctattgatagagcagtttcgaaacactcttgttgtggaaaatgcaggtggatatttggatagcttggaggatttcgttggaagcgggaattcaaataaaaggtagacagcagcattctcagaaatttctttctgatgtctgcattcaactcatagagttgaagattccctttcatagagcaggtttgaaacactctttctggagtatctggatgtggacatttggagcgctttgatgcctacggtgaaaaagtaaatatcttcccataaaaacgagacagaaggattctcagaaacaagtttgtgatgtgtgtactcagctaacagagtggaacctttctttttacagagcagctttgaaactctatttttgtggattctgcaaatggatatttagattgctttaacgatatcgttggaaaagggaatatcgtcatacaaaatctagacagaagcattctcacaaacttctttgtgatgtgtgtcctcaactaacagagttgaacctttattttgatgcagcagtttggaaacactctttttgtagaaactgtgagtggatatttggatagctctaacgatttcgttggaaacgggaatatcatcatctaaaatctagacagaagcactattagaaactagttggtgatatctgcattcaagtcacagagttgaacattcccttactttgagcacgtttcaaacactcttttggaagaatctggaagtggacatttggagcgctttgatgcctttggtgaaaaggaaacgtcttccaataaaagccagacagaagcattctcagaaacttgtttgtgatgtgtgtactcaactaaaagagttgaacctttctattgatagagcagttttgaaacactctttttgtggattctgcaagtggatatttggattgctttgaggatttcgttggaagcgggaattcgtataaaaactagacagcagcattcccagaaatttctttcggatatttccattcgactcatagagatgaacatggcctttcatagagcaggtttgaaacactctttttgtagtttgtggaagtggacatttcgatcgccttgacgcctacggtgaaaaaggaaatatcttcccataaaaaacagacagaagcattctcagaaacttgttggtgatatgtgtcctcaactaacagagttgaactttgccattgatagagagcagttttgaaacactctttttgtggaatctgcaagtggatatttggatagcttggaggatttcgttggaagcgggaattcaaataaaaggtagacagcagcattctcagaaatttctttctgatgtctgcaatcaactcatagagttgaagattcccgttcatagagcaggtttgaaacactctttgtggagtatctggatgtggacatttggagcgctttgatgcctacggtgaaaaagtaaatatcttcccataaaaacgagacagaaggattctgagaatcaagtttgtgatgtgtgtactcagctaacagagtggaacctctcttttgatgcagcagtttggaaacactctttttgtagaaactgtaagtggatatttggatagctctaatgatttcgttggaaacgggaatatcatcatctaaaatctagacagaagccctctcagaaactactttgtgatatctgcattcaagtcacagagttgaatattcgctttcttagagcacgtttgaaacactctttttgtagtgtctggaagtggacatttggagcgctttgatgcctttggtgagaaagggaatgtcttcccataaaaactagaaagaagcattctcaggaaacttgtttgtgatgtgtgtacccagctaaaggagttgaacatttctattgatagagcagttttgaaacactctttttgtggaaaatgcaagtggatatttggatagcttggaggatttcgttggacgcgggaattcaaataaaaggtagacagcagaattctcagaaatttctttctgatgtctgcattcaactcatagagttgaagattccctttcatagagcaggtttgaaacagtctttctggagtatctggatgtggacatttggagcgctttgatgcctacggtggaaaagtaaatatcttcccataaaaacgagacagaaggattctgagaaacaagtttgtgatgtgtgtactcagctaacagagtggaacctttctttttacagagcagctttgaaactctatttttgtggattctgcaaatggatatttagattgctttaacgatatcgttggaaaagggaatatggtcatacaaaatctagacagaagcattctcacaaacttgtttgtgatgtgtgtcctcaactaacggagttgaacctttcttttgatgcagcaatttggaaacacccttttggtagaaactgtaactggatatttggatagctctaacgatttcgttggaaacgggaatatcatcatctaaaatgtagacagacaagcactattagaaactacttggtgatatctgcattcaagtcacagagttgaacattcccttactttgagcacgtttcaaacactcttttggaagaatctggaagtggacatttggagcgctttgatgcctttggtgaaaaggaaacgtcttccaataaaagccagacagaagcattctcagaaacttgtttgtgatgtgtgtactcaactaaaagagttgaacctttctattgatagagcagttttgaaacactctttttgtggattctgcaagtggatatttggattgctttgaggatttcgttggaagcgggaattcgtataaaaactagacagcagcattcccagaaatttctttcggatatttccattcaactcatagagatgaacatggcctttcatagagcaggtttgaaacacgctttttgtagtttgtggaagtggacatttcgatcgccttgacgcctacggtgaaaaaggaaatatcttcccataaaaaatagacagaagcattctcagaaacttgttggtgatatgtgtcctcaactaacagagttgaactttgccattgatagagagcagttttgaaacactctttttgtggaatctgcaagtggatatttggatagcttggaggatttcgttggaagcgggaattcaaataaaaggtagacagcagcattctcagaaatttctttctgatgtctgcattcaactcatagagttgaacattccctttcatagaacaggtttgaaacactctttctggagtatctggatgtggacatttggagcgctttgatgcctacggtgaaaaagtaaatatcttcccataaaaacgagacagaaggattctcagaaacaagtttgtgatgtttgtactcagctaacagagtggaacctctcttttgatgcagcagtttggaaacactctttttgtagaaactgtaagtggatatttggatagctctaatgatttcgttggaaacgggaatatcatcatctaaaatctagagagaagccctctcagaaaccactttgtgatatctgcattcaagtcacagatttgaacattcgttttcttagagcacgtttgaaacactctttttgtagtgtctggaagtggacatttggagcgctttgatgcctttggtgaaaaagggaatgtcttcccataaaaactagacagaagcattctcagaaacttgtttgtgatgtgtgtacccagccaaaggagttgaacatttctattgatagagcaggtttgaaacactctttttgtggaaaatgcaggtggatatttggatagcttggaggatttcgttggaagcgggaattcaaataaaaggtagacagcagcattctcagaaatttctttctgatgtctgcattcaacctcatagagttgaagattccctttcatagagcaggtttgaaacactcgttctggagtatctggatgtggacatttggagcgctttgatgcctacagtggaaaagtaaatatcttcccataaaaacgagacagaaggattctcagaaacaagtttgtgatgtgtgtactcagctaacagagtggaacctttctttttacagagcagctttgaaactctatttttgtggattctgcaaattgatatttagattgctttaatgatatcgttggaaaagggaatatcgtcatacaaaatctagacagaagcattctcacaaacttctttgtgacgtgtgtcctcaactaacagagttgaacctttcttttgatgcagcagtttggaaacactgtttttgtagcaactataagtggatatttggatagctctaacgatttcgttggaaacgggaatatcatcatctaaaatctagacagaagcactattagaaactacttagtgatatctgcattcaagtcacagagttgaacattcccttactttgagcacgtttgaaacactcttttggaagaatctggaagtggacatttggagcgctttgatgcctttggtgaaaaggaaacgtcttccaataaaagccagacagaagcattctcagaaacttgtttgtgatgtgtgtactcaactaaaagagttgaacctttctattgatagagcagttttgaaacactctttttgtggattctgcaagtggatatttggattgctttgaggatttcgttggaagcgggaattcgtataaaaactagacagcagcattcccagaaatttctttcggatatttccattcaactcatagagatgaacatggcctttcatagagcaggtttgaaacactctttttgtagtttgtggaagtggacatttcgatcgccttgatgcctacggtgaaaaaggaaatatctacccataaaaaatagacagaagcattctcagaaacttgttggtgatatgtgtcctcaactaacagagttgaactttgccattgatagagagcagttttgaaacactctttttgtggaatctgcaagtggatatttggatagcttggaggatttcgttggaagcgggaattcaaataaaaggtagacagcagcattctcagaaatttctttctgatgcctgcattcaactcatagagttgaagattccctttcatagagcaggtttgaaacactctttctggagtatctggatgtggacatttggagcgctttgatgcctacggtgagaaagtaaatatcttcccataaaaacgagacagaaggattctgagaaacaagtttgtgatgtgtgtactcagctaacagagtggaacctctcttttgatgcagcagtttggaaacactctttttgtggaaactgtaagtggatatttggatagctctaatgatttcgttggaaacgggaatatcatcatctaaaatctagacagaagccctctcagaaactactttgtgatatctgcattcaagtcacagagttgaacattcgctttcttagagcacgtttgaaaccctctttttgtagtgtctggaagtggacatttggagcgctttgatgcctttggtgaaaaagggaatgtcttcccataaaaactagacagaagcattctcagaaacttgtttgtgatgtgtgtacccagccaaaggagttgaacatttctattgatagagcagttttgaaacactcttgttgtggaaaatgcaggtggatatttggatagcttggaggatttcgttggaagcgggaattcaaataaaagttagacagcagcattctcagaaatttctttctgatgtctgcattcaactcatagagttgaagattccctttcatagagtaggtttgaaacactctttctggagtatctggatgtggacatttggagcgctttgatgcctacggtgaaaaagtaaatatcttcccataaaaacgagacagaaggattctcagaaacaagtttgtgatgtgtgtactcagctaacagagtggaacctttctttttacagagcagctttgaaactctattgttgtggattctgcaaattgatatttagattgctttaacgatatcgttggaaaagggaataccgtcatacaaaatctagacagaagcattctcacaaacttctttgtgatgtgtgtcctcaactaacagagttgaacctttcttttgatgcagcaatttggaaacacccttttagtagaaactgtaactggatatttggatagctctagcgatttcgttggaaacgggaatatcatcatctaaaatctagacagaagcactattagaaactacttggtgatatctgcattcaagtcacagagttgaacattcccttactttgagcacgtttgaaacactcttttggaagaatctggaagtggacatttggagcgctttgatgcctttggtgaaaaggaaacgtcttccaataaaagccagagagaagcattctcagaaacttgttcgtgatgtgtgtactcaactaaaagagttgaacctttcttttgatagcgcagttttgaaacactctttttgtggattctgcaagtggatatttggattgctttgaggatttcgttggaagcgggaattcgtataaacactagacagccagcattcccagaaatttctttcggatatttccattcaacttatagagatgaacatcgcctttcatagagcaggtttgaaacactctttttgtagtttgtggaagtggacatttcgatcgccttgatgcctacggtgaaaaaggaaatatcttcccataaaaaatagacagagcattctcagaaacttgttggtgatatgtgtcctcaactaacagagtggatctttgccattgatagagagcagttttgaaacactctttttgtggaatctgcaagtggatatttggatagcttggaggatttcgttggaagcgggaattcaaataaaaggtagacagcagcattctcagaaatttctttctgatgtctgcattcaactcatagagttgaagattccctttcatagagcaggtttgaaacactctttctggagtatctggatgtggacatttggagcgctttgatgcctacggtgagaaagtaaatatcttcccataaaaacgagacagaaggattctgagaaacaagtttgtgatgtgtgtactcagctaacagagtggaacctctcttttgatgcagcagtttggaaacactctttttgtagaaactgtaagtggatatttggatagctctaatgatttcgttggaaacgggaatatcatcatctaaaatctagacagaagccctctcagaaactactttgtgatatctgcattcaagtcacagagttgaacattcgctttcttagagcacgttggaaacaatctttttgtagtgtctggaagtggacatttggagcgctttgatgcctttggtgaaaaagggaacgtcttcccataaaaactagacagaagcattctcagaaacttgtttgtgatgtgtgtacccagctaaaggagttgaacatttctattgatagagcagttttgaaacactctttttgtggaatctgcaagtggatatttggatagcttggaggatttcgttggaagcgggaattcaaataaaaggtagacagcagcattttcagaaatttctttctgatgtctgcattcaactcatagagttgaagattccctttcatagagcaggtttgaaacactcgttctggagtatctggatgtggacatttggagcgctttgatgcctacggtggaaaagtaaatatcttcccataaaaacgagacagaaggattctgagaaacaagtttgtgatgtgtgtactcagctaacagagtggaacctttctttttacagagcagctttgaaactctatttttgtggattctgcaaattgatatttagattgctttaacgatatcgttggaaaagggaatatcgtcatacaaaatctagacagaagcattctcacaaacttctttgtgatgtgtgtcctcaactaacagagttgaacctatcttttgatgcagcaatttggaaacacccttttggtagaaactgtaactggatatttgcttagctctaacgatttcgttggaaacgggaatatcatcatctgaaatctagacagaagcactattagaaactacttggtgatatctgcattcaagtcacagagttgaacattcccttactttgagcacgtttgaaacactcttttggaagaatctggaagtggacatttggagcgctttgatgcctttggtgaaaaggaaacgtcttccaataaaagccagacagaagcattctcagaaacttgtttgtgatgtgtgtactcaactaaaagagttgaacctttctattgatagagcagttttgaaacactctttttgtggattctgcaagtggatatttggattgctttgaggatttcgttggaagcgggaattcgtataaaaactagacagcagcattcccagaaatttctttcggatatttccattcaactcatagagatgaacattgcctttcatagagcaggtttgaaacactctttttgtagtttgtggaagtggacatttcgatcgccttgacgcctacggtgaaaaaggaaatatcttcccataaaaaatagacagataagcattctcagaaacttgttggtgatatgtgtcctcaactaacagcagttgaactttgccattgatagagagcagtttggaaacactctttttgtggaatctgcaagtggatatttggatagcttggaggatttcgttggaagcgggaattcaaataaaaggtagacagcagcattctcagaaatttctttctgatgtctgcattcaactcatagagttgaagattccctttcatagagcaggtttgaaacactctttctggagtatctggatgtggacatttggagcgctttgatgcctacggtgaaaaagtaaatatcttcccagaaaaacgagacagaaggattctgagaaacaagtttgtgatgtgtgtactcagctaacagagtggaacctctcttttgatgcagcagtttggaaacactctttttgtagaaactgtaagtggatatttggatagctctaatgatttcgttggaaacgggaatatcatcatctaaaatctagacagaagccctctcagaaactactttgtgatatctgcattcaagtcacagagttgaacatttgctttcttagagcacgtttgaaacaccctttttgtagtgtctggaagtggacatttggagcgctttgatgcctttggtgaaaaagggaacgtcttcccataaaaactagacagaagcattctcagaaacttgtttgtgatgtgtgtacccagccaaaggagttgaacatttctattgatagagcagttttgaaacactcttgttgtggaaaatgcaggaggatatttggatagcttggaggatttcgttggaagcgggaattcaaataaaaggtagacagcagcattctcacaaacttctttgtgatgtgtgtcctcaactaacagagttgaacctttcttttgatgcagcagtttggaaacactctttttgtagaaactgtaagtggatatttggatagctctaatgatttcgttggaagcgggaatatcatcatctaaaatctagacagaagccctctcagaaactacttggtgatatctgcattcaagtcacagagttgaacattcgctttcttagagcacgtttgaaacactctttttgtagtgtctggaagtggacatttggagcgctttgatgcctttggtgaaaaagggaatgtcttcccataaaaactagacagaagcattctcagaaacttgtttgtgatgtgtgtacccagacaaaggagttgaacatttctattgatagagcagttttgaaacactttttttgtgcaaaatgcaggtggatatttggatagcttggaggatttcgttggaagcgggaattcaaataaaaggtagacagcagcattctcagaaatttctttctgattctgcattcaactcatagagttgaagattccctttcatagagcaggtttgaaacactcgttctggagtatctggatgtggacatttggagcgctttgatgcctatggtggaaaagtaaatatcttcccatagaaacgagacagaaggattctgagaaacaagtttgagatgtgtgtactcagctaacagagtggaacctttctttttacagagcagctttgaaactctatttttgtggattctgcaaattgatatttagattgctttaacgatatcgttggaaaagggaatatcgtcatacaaaatctggacagaagcattctcacaaacttctttgtgatgtgtgtcctcaactaacagagttgaacctttcttttgatgcagcagtttggaaacacccttttggtagaaactgtaagtggatatttggatagctctaacgaattcgttggaaacgggaatatcatcatctaaaatctagacagaagcactattagaaactacttggtgacatctgcattcaagtcacagagttgaacattcccttacttcgagcacgtttgaaacactcttttggaagaatctggaagtggacatttggagcgctttgatgcctttggtgaaaaggaaacgtcttccaataaaagccagacagaagcattctcagaaacttgtttgtgatgtgtgtactcaactaaaagagttgaacctttctattgatagagcagttttgaaacactctttttgtggattctgcaagtggatatttggattgctttgaggatttcattggaagcgggaattcgtataaacactagacagcagcattcccagaaatttctttcggatatttccattcaactcatagagatgaacatggcctttcatagagcaggtttgaaacactctttttgtagtttgtggaagtggacatttcgatcgccttgacgcctacgctgaaaaaggaaatatcttcccataaaaaatagacagaagcattctcagaaacttgttggtgatatgtgtcctcaactaacagagttgaactttgccattgatagagagcagttttgaaacactctttttgtggaatctgcaagtggatatttggatagcttggaggatttcgttggaagcgggaattcaaataaaaggtagacagcagcattctcagaaatttctttctgatgtctgcattcaactcatagagttgaagattccctttcatagagcaggtttgaaatactctttctggagtatctggatgtggacatttggagcgatttgaggcctacgatgaaaaagtaaatatcttcccataaaaacgagacagaaggattctgagaaacaagtttgtgatgtgtgtactcagctaacagagtggaacctctctttggatgcagcagtttggaaacactctttttgtagaaactgtatgtggatatttggatagctctaatgatttcgttggaaacgggaatatcatcatctaaaatctagacagaagccctctcagaaactactttgtgatatctgcattcaagtcacagagttgaacattcgctttcttagagcacgtttgaaacactctttttgtagtgtctggaagtggacatttggagcgctttgatgcctttggtgaaaaagggaacgtcttcccataaaaactagacagaagcattctcagaaacttgtttgtgatgtgtgtacccagccaaaggagttgaacatttctattgctagagcagttttgaaacactctttttgtggaaaatgcaggtggatatttggatagcttggaggatttcgttggaagcgggaattcaaataaaaggtagacagcagcattctcagaaatttctttctgatgtctgcattcaactcatagagttgaagattccctttcatagagcaggtttgaaacagtctttctggagtatctggatgtggacatttggagtgctttgatgcctacggtgaaaaagtaaatatcttcccataaaaacgagacagaaggattctcagaaacaagtttgtgatgtgtgtactcagctaacagagtggaacctttctttttacagagcagctttgaaactctatttttgtggattctgcaaattgatatttagattgctttaacgatatcgttggaaaagggaatatcgtcatacaaaatccagacagaagaattctcacaaacttctttgtgatgtgtgtcctcaactaacagagttgaacgtttcttttgatgcagcagtttggaaacactctttttgtagaaactgtaagtggatatttggatagctctaacgatttcgttggaaacgggaatatcatcatctaaaatctagacagaagcactattagaaactacttggtgatatctgcattcaagtcacagagttgaacattcccttactttgagcacgtttcaaacactcttttggaagaatctggaagtggacatttggagcgctttgatgcctttggtgaaaaggaaacgtcttccaataaaagccagacagaagcattctcagaaacttgtttgtgatgtgtgtactcaactaaaagagttgaacctttctattgatagagcagttttgaaacactctttttgtggattctgcaagtggatatttggattgctttgaggatttcgttggaagcgggaattcgtataaaaactagacagcagcattcccagaaatttcttttggatatttccattcgactcatagagatgaacatggcctttcatagagcaggtttgaaacactctttttgtagtttgtggaagtggacatttcgatcgccttgacgcctacggtgaaaaaggaaatatcttcccataaaaaatagacagaagcattctcagaaacttgttggtgatatgtgtcctcaactaacagagttgaactttgccattgatagagagcagttttgaaacactctttttgtggaatctgcaagtggatatttggatagcttggaggatttcgttggaagcgggaattcaaataaaaggtagacagcagcattctcagaaatttctttctgatgtctgcattcaactcatagagttgagcattccctttcatagagcaggtttgaaacactcgttctggagtatctggatgtggacatttggagcgctttgatgcctacggtggaaaagtaaatatcttcccataaaaacgagacagaaggattctgagaaacaagtttgtgatgtgtgtactcagctaacagagtggaacctctcttttgatgcagcagtttggaaacactctttttgtagaaactgtaagtggatatttggatagctctaatgatttcgttggaaacgggaatatcatcatctaaaatctagacagaagcactctcagaaactactttgtgatatctgcattcaagtcacagagttgaacattcggtttcttagagcacgtttgaaacactctttttgtagtgtctggaagtggacatttggagcgctttgatgcctttggtgaaaaagggaatgtcttcccataaaaactagacagaagcattctcagagacttgtttgtgatgtgtgtacccagccaaaggagttgaacatttctattgatagagcagttttgaaacactcttgttgtggaaaatgcaggtggatatttggatagtttggaggatttcgttggaagcgggaatacaaataaaaggtagacagcagcattctcagaaatttctttctgatgtctgcattcaactcatagagttgaacattccctttcatagagcaggtttgaaacactctttctggagtatctggatgtggacatttggagcgctttgatgcctacggtgaaaaagtaaatatcttcccagaaaaacgagacagaaggattctcagaaacaagtttgtgatgtgtgtactcagctaacagagtggaacctttctttttacagagcagctttgaaactctatttttgtggattctgcaaattgatatttagattgctttaacaatatcgttggaaaagggaatatcgtcatacaaaatctagacagaaagcattctcacaaacttctttgtgatgtgtgtcctcaactaacagagttgaacctttcttttgatgcagcagtttggaaacactctttttgtagaaactgtaagtggatatttggatagctctaacgatttcgttggaaacgggaatatcatcatctaaaatctagacagagcactattagaacctactttgtgatatctgcattcaagtcaaagagttgaacattcccttactttgagcacgtttgaaacactcttttggaagaatctggaagtggacatttggagcgctttgatgcctttggtgaaaatgaaacgtcttccaataaaagccagacagaagcattctcagaaacttgtttgtgatgtgtgtactcaactaaaagagttgaacctttctattgatagagcagttttgaaacactctttttgtggattctgcaagtggatatttggattgctttgaggatttcgttggaagcgggaattcgtataaaaactagacagcagcattcccagaaatttctttcggatatttccattcaactcatacagatgaacatcgcctttcatagagcaggtttgaaacactctttttgtagtttgtggaagtggacatttcgatcgccttgacgcctacggtgaaaaaggaaatatcttcccataaaaaatagacagaagcattctcagaaacttgttggtgatatgtgtcctcaactaacagagttgaactttgccattgatagagagcagttttgaaacactctttttgtggaatctgcaagtggatatttggatagcttggaggatttcgttggaagcgggaattcaaataaaaggtagacagcagcattctcagaaatttctttctgatgtctgcattcaactcatagtagttgaagattccctttcatagagcaggtttgaaacactcgttctggagtatctggatgtggacatttggagcgctttgatgcctacggtggaaaagtaaatatcttcccataaaaacgagacagaaggattctgagaaacaagtttgtgatgtgtgtactcagctaacagagtggaacctctcttttgatgcagcagtttggaaacactctttttgtagaaactgtaagtggatatttggatagctctaatgatttcgttggaaacgggaatatcatcatctaaaatctagacagaagccctctcagaaactactttgtgatatctgcattcaagtcacagagttgaacattagctttcttagagcacgttggaaacactctttttgtagtgtctggaagtggacatttggagcgctttgattcctttggtgaaaaagggaatgtctacccataaaaactagacagaagcattctcagaaacttgtttgtgatgtgtgtacccagccaaaggagttgaacatttctattgatagagcaggtttgaaacactctttttgtggaaaatgcaggtggatatttggatagcttggaggatttcgttggaagcgggaattcaaataaaaggtagacagcagcattctcagaaatttctttctgatgtctgcattcaactcatagagttgaagattccctttcatagagcaggtttgaaacactctttctggagtatctggatgtggacatttggagcactttgatgcctacggtgaaaaaggaaatatcttcccataaaaacgagacagaaggattctcagaaacaagtttgtgatgtgtgtactcagctaacagagtggaacctttctttttacagagcagctttcaaactctatttttgtggattctgcaaattgatatttagattgctttaacgatatcgttggaaaagggaatatcgtcatacaaaatctggacagaagcattctcacaaacttctttgtgatgtgtgtcctcaactaacagagttgaacctttcttttgatgcagcagtttggaaacactctttttgtagaaagtgtaagtggatatttggatagctctaacgatttcgttggaaacgggaatatcatcatctaaaatctagacagaagcactattagaaactacttggtgatatctgcattcaagtcacagagttgaacattcccttactttgagcacgtttgaaacactcttttggaagaatctggaagtggacatttggagcgctttgatgcctttggtgaaaaggaaacgtcttccaataaaagccagacagaagcattctcagaaacttgttcgtgatgtgtgtactcaactaaaagagttgaacctttctattgatagagcagttttgaaacactctttttgtggattctgcaagtggatatttggattgctttgaggatttcgttggaagcgggaattcgtataaactactagacagcagcattcccagaaatttctttcggatatttccattcaactcatagagatgaacatggcctttcatagagcaggtttgaaacactctttttgtagtttatggaagtggacatttcgatcgccttgacgcctacggtgaaaaaggaaatatcttcccataaaaaatagacagaagcattctcagaaacttgttggtgatatgtgtcctcaactaacagagttgaactttgccattgatagagagcagttttgaaacactctttttgtggaatctgcaagtggatatttggatagcttggaggatttcgttggaagcgggaattcaaataaaaggtagacagcagcattctcagaaatttctttctgatgtctgcattcaactcatagagttgaagattacctttcatagagcaggtttgaaacactctttctggagtatctggatgtggacatttggagcgctttgatgcctacggtgaaaaagtaaatatcttcccataaaaacgagacagaaggattctgagaaacaagtttgtgatgtgtgtactcggctaacagagtggaacctctcttttgatgcagcagtttggaaacactctttttgtagaaactgtaagtggatatttggatagctctaatgatttcgttggaaacgggaatatcatcatctaaaatctagacagaagcactctcagaaactactgtgtgatatctgcattcaagtcacagagttgaacattcgctttcttagagcacgtttgaaacactctttttgtagtgtctggaagtggacatttggagcgctttgattcctttggtgaaaaagggaatgtctacccataaaaactagacagaagcatcctcagaaacttgtttgtgatgtgtgtacccagccaaaggagttgaacatttctattgatagagcagttttgaaacactctttttgtggaaaagtgcaaggtggatatttggagtagcttggaggatttcgttggaagcgggaattcaaataaaaggtagacagcagcattctcagaaatttctttctgatgtctgcattcaactcatagagttgaagattccctttcatagagcaggtttgaaacactctttctggagtatctggatgtggacatttggagtgctttgatgcccacggtgaaaaagtaaatatcttcccataaaaacgagacagaaggattctgagaaacaagtttgtgatgtgtgtactcagctaacagagtggaacctttctttttacagagcagctttgaaactctatttttgtggattctgcaaattgatatttagattgctttaacgatatcgttggaaaagggaatatcgtcatacaaaatctagacagaagcattctcacaaacttctttgtgatgtgtgtcctcaactaacagagttgaacctttcttttgatgcagcaatttggaaacacccttttggtagaaactgtaactggatatttggatagctctaacgatttcgtttgaaacgggaatatcatcatctaaaatgtagacagaagcactattagaaactacttggtgatatctgcattcaagtcacagagttgaacattcccttactttgagcacgtttgaaacactcttttggaagaatctggaagtggacatttggagcgctttgatgcctttggtgaaaaggaaacgtcttccaataaaagccagagagaagcattctcagaaacttgttcgtgatgtgtgtactcaactaaaagagttgaacctttctattgatagagcagttttgaaacactctttttgtgtattctgcaagtggatatttggattgctttgaggatttcgttggaagcgggaattcgtataaacactagacagcagcattcccagaaatttctttcggatatttccattcgactcatagagatgaacatggcctttcatagagcaggtttgaaacactctttttgtagtttgtggaagtggacatttcgatcgccttgacgcctacggtgaaaaaggaaatatcttcccataaaaaaagacagaagcattctcagaaacttgttggtgatatgtgtcctcaactaacagagttgaactttgccattgatagagagcagttttgaaacactctttttgtggaatctgcaagtggatatttggatagcttggaggatttcgttggaagcgggaattcaaataaaaggtagacagcagcattctcagaaatttctttctgatgtctgcattcaactcatagagttgaagattccctttcatagagcaggtttgaaacactctttctggagtatctggatgtggacatttggagcgctttgatgcctacggtgaaaaagtaaatatcttcccataaaaacgagtcagaaggattctcagaaacaagtttgtgatgtgtgtactcagctaacagagtggaacctctcttttgatgcagcagtttggaaacactctttttgtagaaactgtaagtggatatttggatagctctaatgatttcgttggaaacgggaatatcatcatctaaaatctagagagaagccctctcagaaactactttgtgatatctgcattcaagccacagagttgaacattcgctttcttagagcacgtttgaaacactctttttgtagtgtctggaagtggacatttggagctgctttgatgcctttggtgaaaaagggaatgtcttcccataaaaactagacagaaagcattctcagaaacttgtttgtgatgtgtgtacccagccaaaggagttgaacatttctattgatagagcagttttgaaacactcttgttgtggaaaatgcaggtggatatttggatagcttggaggatttcgttggaagcgggaattcaaataaaaggtagacagagcattctcagaaatttctttctgattctgcattcaactcatagagttgaagattccctttcatagagcaggtttgaaacactcgttctggagtatctggatgtggacatttggagcgctttgatgcctacagtggaaaagtaaatatcttcccataaaaacgagacagaaggattctcagaaacaagtttgggatgtgtgtactcagctaacagagtggaacctttctttttacagagcagctttgaaactctgtttttgtggattctgcaaattgatatttagattgctttaacgatatcgttggaaaagggaatatcgtcatacaaaatctagacaggaaagcattctcacaaacttctttgtgatgtgtgtcctcaactaacagagttgaacctttcttttgatgcagcaatttggaaacacccttttggtagaaactgtaactggatatttggatagctctaacgatttcgttggaaacgggaatatcatcatctaaaatgtagacagaagcactattagaaactacttggtgatatctgcattcaagtcacagagttgaacattcccttactttgagcacgtttgaaacactcttttggaagaatctggaagtggacatttggagcgctttgatgcatttggtgaaaaggaaacgtcttccaataaaagccagacagaagcattctcagaaacttgttcgtgatgtgtgtactcaactaaaagagttgaacctttctattgatagagcagttttgaaacactctttttgtggattctgcaagtggatatttggattgctttgaggatttcgttggaagcgggaattcgtataaaaactagacagcagcattcccagaaatttctttcggatatttccattcaactcatagagatgaacatggccttttatagagcaggtttgaaacactctttttgtagtttgtggaagtggacatttcgatcgccttgacgcctacggtgaaaaaggaaatatcttcccataaaaaatagacagaagcattctcagaaacttgttggtgatatgtgtcctcaactaacagagttgaactttgccattgatagagagcagttttgaaacactctttttcctgaatctgcaagtggatatttggatagtttggaggatttcgttggaagcgggaattcaaataaaaggtagacagcagcattctcagaaatttctttctgatgtctgcattcaactcatagagttgaagattccctttcatagagcaggtttgaaacactctttctggagtatctggatgtggacatttggagcgcttggatgcctacggttaaaaagtaaatatcttcacataaaaacgacacagaaggattctgagaaacaagtttgtgatgtgtgtactcagctaacagagtggaacctctcttttgatgcagcagtttggaaacactctttttctagaaactgtaagtggatatttggatagctgtaatgatttcgttggaaacgggaatatcatcatctaaaatctagacagaagccctctcagaaactactttgtgatatctgcattcaagtcacagagttgaacattcgctttcttagagcacgtttgaaacactctttttgtagtgtctggaagtggacatttggatcgctttgatggctttggtgaaaaagggaatgtcttcccataaaaactagacagaagcattctcagaaacttgtttgtgatgtgtgtacccagctaaaggagttgaacgtttctattgatagagcagttttgaaacactctttttgtggaaaatgcaagtggatatttggatagcttggaggatttcgttgtaagcgggaattcaaataaaaggtagacagcagcattctcagaagtttctttctgatgtctgcattcaactcatagagttgaagattccctttcatagagcaggtttgaaacactctttctggagtatctggatgtggacatttggagcgctttgatgcctacggtgaaaaagtaaatatcttcccataaaaacgagacagaaggattctcagaaacaagtttgtgatgtgtgtactcagctaacagagtggaacctttctttttacagagcagctttgaaactctatttttgtggattctgcaaattgatatttagattgctttaacgatatcgttggaaaagggaatatcgtcatacaaaatatagacagaagcattctcacaaacttctttgtgatgtgtgtcctcaactaacagagttgaacctttcttttgatgcagcaatttggaaacacccttttggtagaaactgtaactggatatttggatagctctagcgatttcgttggaaacgggaatatcatcatctaaaatgtagacagaagcactattagaaactacttggtgatatctgcattcaagtcacagagttgaacattcccttactttgagcacgtttgaaacactcttttggaagaatctggaagtggacatttggagcgctttgatgcctttggtgaaaaggaaacgtcttccaataaaagccagacagaaagcattctcaggaaacttgtttgtgatgtgtgtactcaactaaaagagttgaacctttctattgatagagcagttttgaaacactctttttgtggattctgcaagtggatatttggattgctttgaggatttcgttggaagcgggaattcatataaaaactagacagcagcattcccagaaatttctttcggatatttccattcaactcatagagatgaacatggcctttcatagagcaggtttgaaacactctttttgtagtttgtggaagtggacatttcgatcgccttggcgcctacgctgaaaaaggaaatatcttcccataaaaaatagacagaagcattctcagaaacttgttggtgatatgtgtcctcaactaacagagttgaactttgccattgatagagagcagttttgaaacactctttttgtggaatctgcaagtggatatttggatagcttggaggatttcgttggaagcgggaattcaaataaaaggtagacagcaggattctgagaaacaagtttgtgatgtgtgtactcagctaacagagtgcaacctttctttttacagagcagctttgaaactctatttttgtggattctgcaaatggatatttagattgctttaacgatatcgttggaaaagggaatatcgtcatacaaaatctagacagaagcattctcacaaacttctttgtgatgtgtgtcctcaactaacagagttgaacctttcttttgatgcagcagtttggaaacactctttttgtagcaactgtaagtggatatttggatagctctaacgatttcgttggaaacgggaatatcatcatctaaaatactagacagaagcactattagaaactacttggtgatatctgtattcaagtcacagtagttgaacattcccttactttgagcacgtttgaaacactcttttggaagaatctggaagtggacatttggagcgctttgatgcctttggtgaaaaggaaacgtcttccaataaaagccagagagaagcattctcagaaacttgtttgtgatgtgtgtactcaactaaaagagttgaacctttctattgatagagcagtttagaaacactctttttgtggattctgcaagtggatatttggattgctttgaggatttcgttggaagcgggaattcgtataaacactagacagcagcattcccagaaatttctttcggatatttccattcaactcatagagatgaacatggcctttcatagagcaggtttgaaacactctttttgtagtttgtggaagtggacatttcgatcgccttgacgcctacggtgaaaaaggaaatatcttcccataaaaaatagacagaagcattctcagaaacttgttggtgatatgtgtcctcaactaacagagttgaactttgccattgatagagagcagttttgaaacactctttttgtggaatatgcaagtggatatttggatagcttggaggatttcgttggaagcgggaattcaaataaaaggtagacagcagcattctcagtaaatttctttctgatgtctgcattcaactcatagcagttgaagattccctttcatagagcaggtttgaaacactcgttctggagtatctggatgtggacatttggagcgctttgatgcctacggtggaaaagtaaatatcttcccataaaaacgagacagaaggattctgagaaacaagtttgtgatgtgtgtactcagctaacagagtggaacctctcttttgatgcagcagtttggaaacactctttttgtagaaactgtaagtggatatttggatagctctaatgatttcgttggaaacgggaatatcatcatctaaaatctagacagaagccctctcagaaactactttgtgatatctgcattcaagtcacagagttgaacattcgctttcttagggcacgttggaaacactctttttgtagtgtctggaagtggacatttggagcgctttgatgcctttggtgaaaaagggaacgtcttcccataaaaactagacagaagcattctcagaaacttgtttgtgatgtgtgtacccagccaaaggagttgaacgtttctattgatacagcagttttgaaacactcttgttgtggaaaatgcaggtggatatttggatagcttggaggatttcgttggaagcgggaattcaaataaaaggtagacagcaggattctcagaaacaagtttgtgatgtgtgtactcagctaacagagtggaacctttctttttacagagcagctttgaaactctatttttgtggattctgcaaattgatatttagattgctttaacgatatcgttggaaaagggaatacggtcatacaaaatctagacagaagcattctcacaaacttctttgtgatgtgtgtcctcaactaacagagttgaacttttcttttgatgcagcaatttggaaacacccttttggtagaaactgtaactggatatttggatagctctagcgatttcgttggaaacgggaatatcatcatctaaaatgtagacagaagcactattagaaactacttggtgatatctgcattcaagtcacagagtagaacattcccttacttcgagcacgtttgaaacactcttttggaagaatctggaagtggacatttggagcgctttgatgcctttggtgaaaaggaaacgtcttccaataaaagccagacagaagcattctgagaaacttgttcgtgatgtgtgtactcaactaaaagagttgaacctttctattgatatagcagttttgaaacactctttttgtggattctgcaagtggatatttggattgctttgaggatttcgttggaagcaggaattcatataaacactagacagcagcattcccagaaatttctttcggatatttccattcaactcatagagatgaacatggcctttcatagagcaggtttgaaacactctttttgtagtttgtggaagtggacatttcgatcgccttgacgcctacggtgaaaaaggaaatatcttcccataaaaaatagacagaagcattctcagaaacttgttggtgatatgtgtcctcaactaacagagttgaactttgccattgatagagagcagttttgaaacactctttttgtggaatctgcaagtggatatttggatagctggaggatttcgttggaagcgggaattcaaataaaaggtagacagccagcattctcagaatttctttctgatgtctgcattcaactcatagagttgaagattccctttcatagagcaggtttgaaacactctttctggagtatctggatgtggacatttggagcgctttgatgcctacggtgaaaaagtaaatatcttcccataaaaacgagacagaggattctgagaaactagtttgtgatgtgtgtactcagctaacagagtggaacctctgttttgatgcagcagtttggaaacactctttttgtagaaactgtaagtggatatttggatagctctaatgatttcgttggaaacgggaatatcatcatctaaaatactagacagaagccctctcagaaactactttgtgatatctgcattcaagtcacagagttgaacatgcgctttcttagagcacgtttgaaacactctttttgtagtgtctggaagtggacatttggagcgctttgatgcctttggtgaaaaagggaacgtcttcccataaaaactagacagaagcattctcagaaacttgtttgtgatgtgtgtacccagccaaaggagttgaacatttctattgatagagcagttttgaaacactctttttgtggaaaatgcaggtggatatttggataccttggaggatttcgttggaagcgggaattcaaataaaaggtagacagcaggattctcagaaacaagattgtgatgtgtgtactcagctaacagagtggaacctttctttttacagagcagctttgaaactctatttttgtggattctgcaaattgatatttagattgctttaacgatatcgatggaaaagggaatatcatcatacaaaatctagacagaagcattctcacaaacttctttgtgatgtgtgtcctcaactaacagagttgaacctttcttttgatgcagcagtttggaaacactctttttgtagaaactgtaagtggatatttggatagctctaacgatttcattggaaacgggaatatcatcatctaaaatgtagacagaagcactattagaaactacttggtgatatctgcattcaagtcacagagttgaacattcccttactttgagcacgtttgaaacactcttttggaagaatctggaagtggacatttggagcgctttgatgcctttggtgaaaaggaaacgtcttccaataaaagccagacagaagcattctcagaaacttgtttgtgatgagtgtactcaactaaaagagttgaacctttctattgatagagcagttttgaaacactctttttgtggattctgcaagtggatatttggattgctttgaggatttcgttggaagcgggaattcgtataaacactagacagcagcattcccagaaatttctttcggatatttccattcaactcataaagatgaacatggcctttcatagagcaggtttgaaacactctttttgtagtttgtggaagtggacatttcgatcgccttgacgcctacggtgaaaaaggaaatatcttcccataaaaaatagacagaagcattctcagaaacttgttggtgatatgtgtcctcaactaacagagttgaactttgccattgatagagagcagttttgaaacactctttttgtggaatctgcaagtggatatttggatagcttggaggatttcgttggaagcgggaattcaaataaaaggtagacagcagcattctcagaaatttctttctgatgtctgcattcaactcatagagttgaagattccctttcatagagcaggtttgaaacactctttctggagtatctggatgtggatatttggagcgctttgatgcctacggtgagaaagtaaatatcttcccataaaaacgagacagaaggattctgagaaacaagtttgtgatgtgtgtactcagctaacagagtggaacctctcttttgatgcagcagtttggaaacactctttttgtagaaactgtaagtggatatttggatagctctaatgatttcgttggaaacgggaatatcatcatctaaaatctagacagaagcactctcagaaactactttgtgatatctgcattcaagtcacagagttgaacattcgctttcttagagcacgttggaaacactctttttgtagtgtctggaagtggacatttggagcgctttgattcctttggtgaaaaagggaatgtctacccataaaaactagacagaagcattctcagaaacttgtttgtgatgtgtgtacccagccaaaggagttgaacatttctattgatagagcaggtttgaaacactctttttgtggaaaatgcaggtggatatttggatagcttggaggatttcgttggaagcgggaattcaaataaaaggtagacagcagcattctcagaaatttctttctgatgtctgcattcaactcatagagttgaagattccctttcatagagcaggtttgaaacactcgttctggagtatatggatgtggacatttggagcgctttgatgcctacggtggaaaagtaaatatcttcccataaaaacgagacagaaggattctcagaaacaagtttgtgatgtgtgtactcagctaacagagtggaacctttctttttacagagcagctttgaaactctatttttgtggattctgcaaattgatatttagattgctttaacgatatcgttggaaaagggaatatggtcatacaaaatctagacagaagcattctcacaaacttctttgtgatgtgtgtcctcaactaacagagttgaacctttcttttgatgcagcaatttggaaacacccttttggtagaaactgtaactggatatttggatagctctagcgatttcgttggaaacgggaatatcatcatctaaaatgtagacagaagcactgttagaaactacttggtgatatctgcattcaagtcacagagttgaacattcccttacttcgaccacgtttgaaacactcttttggaagaatctggaagtggacatttggagcgctttgatgcctttggtgaaaaggaaacgtcttccaataaaagccagacagaaagcattctcagaaacttgttcgtgatgtgtgtactcaactaaaagtagttgaacctttctattgatagagcagttttgaaacactctttttgtggattctgcaagtggatatttggattgctttgaggatttcgttggaagcgggaattcgtataaacactagacagcagcattcccagaaatttctttcggatatttccattcaactcatagagatgaacatggcctttcatagagcaggtttgaaacactctttttgtagtttgtggaagtggacatttcgattgccttgacgcctacggtgaaaaaggaaatatcttcccataaaaaatagacagaagcattctcagaaacttgttggtgatatgtgtcctcaactaacagagttgaactttgccattgatagagagcagttttgaaacactctttttgtggaatctgcaagtggatatttggatagcttggaggatttcgttggaagcgggaattcaaataaaaggtagacagcagcattctcagaaatttctttctgatgtctgcattcaactcatagagttgaagattccctttcatagagcaggtttgaaacactctttctggagtatctggatgtggacatttggagcgctttgatgcctacggtgaaaaagtaaatatcttcccaaaaaaacgagacagaaggattctgagaaacaagtttgtgatgtgtgtactcagctaacagagtggaacctctcttttgatgcagcagtttggaaacactctttttgtagaaacagtaagtggatatttggatagctctaatgatttcgttggaaacgggaatatcatcatctaaaatctagacagaagcactctcagaaactactttgtgatatctgcattcaagtcacagagttgaacattcgctttcttagagcacgtttgaaacactctttttgtagtgtctggaagtggacatttggagcgctttgatgcctttggtgaaaaagggaatgtcttcccataaaaactagacagaagcattctcagagtcttgtttgtgatgggtgtacccagccaaaggagttgaacatttctattgatagagcagttttgaaacactcttgttgtggaaaatgcaggtggatatttggatagcttggaggatttcgttggaagcgggaattcaaataaaaggtagacagcaggattctcagaaacaagtttgtgatgtgtgtactcagctaacagagtggaacctttctttttacagagcagctttgaaactctatttttgtggattctgcaaatggatatttagattgctttaacgatatcgttggaaaagggaatatcgtcatacaaaatctggacagaagcattctcacaaacagctttgtgacgtgtgtcctcaactaacacagttgaacctttcttttgatgcagcagtttggaaacacccttttggtagaaactgtaagtggatatttggatagctctaacgatttcgttggaaacgggaatatcatcatctaaaatctagacagaagcactattagaaactacttggtgatatctgcattcaagtcacagagttgaacattcccttactttgagcacgtttcaaacactcttttggaagaatctggaagtggacatttggagcgctttgatgcctttggtgaaaaggaaacgtcttccaataaaagccagacagaagcattctcagaaacttgtttgtgatgtgtgtactcaactaaaagagttgaacctttctattgatagagcagttttgaaacactctttttgtggattctgcaagtggatatttggattgctttgaggatttcgttggaagcgggaattcgtataaaaactagacagcagcattcccagaaatttctttcggatatttccattcaactcatagagatgaacatggcctttcatagagcaggtttgaaacactctttttgtagtttgtggaactggacatttcgatcgccttgacgcctacggtgaaaaaggaaatatcttcccataaaaaatagacagaagcattctcagaaacttgttggtgatatgtgtcctcaactaacagagttgaactttgccattgatagagagcagttttgaaacactctttttgtggaatctgcaagtggatatttggatagcttggaggatttcgttggaagcgggaattcaaataaaaggtagacagcagcattctcagaaatttctttctgatgtctgcattcaactcatagagttgaagattccctttcatagagcaggtttgaaacactctttctggagtatctggatgtggacatttggagcgctttgatacctacggtgtaaaagtaaatatcttcccataaaaacgagacagaaggattctgagaaacaagtttgtgatgtgtgtactcagctaacagagtggaacctctcttttgatgcagcagtttggaaacactctttttgtagaaactgtaagtggatatttggatagctctaatgatttcattggaaacgggaatatcatcatctaaaatctagacagaagccctctcagtaaactactttgtgatatctgcattcaagtcacagagttgaacattcgctttcttagagcacgtttgaaacactctttttgtagtgtctggaagtggacatttggagcgctttgatgcctttggtgaaaaagggaacgtcttcccataaaaactagacagaagcattctcagcaaacttgtttgtgatgtgtgtacccagccaaaggagttgaacatttctattgatagagcagttttgaaacactcttgttgtggaaaatgcaggtggatatttggatagcttggaggatttcgttggaagcgggaattcaaataaaaggtagacagcagcattctcagaaatttctttctgatgtctgcattcaactcatagagttgaagattccctttcatagagcaggtttgaaacactcgttctggagtatccggatgtggacatttggagcgctttgatgcctacggtggaaaagtaaatatcttcccataaaaacgagacagaaggattctgagagacaagtttgtgatgtgtgtactcagctaacagagtggaacctttctttttacagagcagctttgaaactctatttttgtggattctgcaaatggatatttagattgctttaacgatatcgttgggaaaagggaatatggtcatacaaaatctagacagaagcattctcacaaacttctttgtgatgtgtctcctcaactgacagagttgaacctttcttttgatgcagcagtttggaaacactctttttgtagaaactgtaagtggatatttggatagctctaacgatttcgttggaaacgggaatatcatcatctaaaatctagacagaagcactattagaaactacttggtgatatctgcattcaagtcacagagttgaacattcccttactttgagcacgtttgaaacactcttttggaagaatctggaagtggacatttggagcgctttgatgcctttggtgaaaaggaaacgtcttccaataaaagccagacagaagcattctcagaaacttgtttgtgatgtgtgtactcaactaaaagagttgaacctttctattgatggagcagttttgaaacactctttttgtggattctgcaagtggatatgtggattgctttgaggatttcgttggaagcgggaattcgtataacaactagacagcagcattcccagaaatttctttcggatatttccattcaactcatagagatgaacatggcctttcatagagcaggtttgaaacactctttttgtagtttgtggaagtggacatttcgatcgccttgacgcctacgctgaaaaaggaaatatcttcccataaaaaatagacagaagcattctcagaaacttgttggtgatatgtgtcctcaactaacagagttgaactttgccattgatagagagcagttttgaaacactctttttcctgaatctgcaagtggatatttggatagtttggaggatttcgttggaagcgggaattcaaataaaaggtagacagcagcattctcagaaattactttctgatgtctgcattcaactcatagagttgaagattccctttcatagagcaggtttgaaacactctttctgtactatctggaagtggacattgggatcgctttgatgcctacggtgaaaaaggaaatatcttcccataaaagctagacagaaggattctgagaaacaagtttgtgatgtgtgtactcagctaacagagtggaacctctcttttgatgcagcagtttggaaacactctttttgtagaaactgtaagtggatatttggatagctctaatgatttcgttggaaacgggaatatcatcatctaaaatctagacagaagccctctcagaaactactttgtgatatctgcattcaagtcacagagttgaatattcgctttcttagagcacgtttgaaacactctttttgtagtgtctggaagtggacatttggagcgctttgatgcctttggtgaaaaagggaatgtcttcccataaaaactagacagaagcattctcagaaacttgtttgtgatgtgtgtacccagctaaaggagttgaacatttctattgatagagcagttttgaaacactctttttgtggaatctgcaggtggatatttggatagcttggaggatttcgttggaagcgggaattcaaataaaaggtagacagcagcattctcagaaatttctttctgatgtctgcattcaactcatagagttgaagattccctttcatagagcaggtttgaaacactctttctggagtatctggatgtggacatttggagcgctttgatgcctacggtgaaaaagtaaatatcttcccataaaaacgagacagaaggattctgagagacaagtttgtgatgtgtgtactcagctaacagagtggaacctttctttttacagagcagctttgaaactctatttttgtggattctgcaaatggatatttagattgctttaatgatatcgttggaaaagggaatatcgtcatacaaaatctggacagaagcattctcacaaacttctttgtgatgtgtgtcctcaactaacagagttgaacctttcttttgatgcagcaatttggaaacacccttttggtagaaactgtaactggatatttggatagctctaacgatttcgttggaaacgggaatatcctcacctaaaatctagacagaagcactattagaaactacttggtgatatctgcattcaagtcacagagttgaacattcccttactttgagcacgtttcaaacactcttttggaagaatctggaagtggacatttggagcgctttgatgcctttggtgaaaaggaaacgtcttccaataaaagccagacagataagcattctcagcaaacttgtttgtgatgtgtgtactcaactaaaagagttgaacctttctattgatagagcagttttgaaacactctttttgtggattctgcaagtggatatttggattgctttgaggatttcgttggaagcgggaattcatataaaaactagacagcagcattcccagaaatttctttcggatatttccattcaactcatagagatgaacatggcctttcatagagcaggtttgaaacactctttttgtagtttgtggaagtggacatttcgatcgccttgacgcctacggtgaaaaaggaaatatctacccataaaaaatagacagaagcattctcagaaacttgttggtgatatgtgtcctcaactaacagagttgaactttgccattgatagagagcagttttgaaacactctttttgtggaatctgcaagtggatatttggatagcttggaggatttcgttggaagcgggaattcaaataaaaggtagacagcagcattctcagaaatttctttctgatgtctgcattcaactcatagagttgaagattccctttcatagagcaggtttgaaacactcgttcagagtatctggatgtggacatttggagcgctttgatgcctacggtgaaaaagtaaatatcttcccataaaaacgagacagaaaggattctgagaaacaagtttgtgatgtgtgtactcagctaacagagtggaacctctcttttgatgcagcagtttggaaacactctttttgtagaaactgtaagtggatatttggatagctctaatgatttctttggaaacgggaatatcatcatctaaaatctagacagaagcactattagaaactactttgtgatatctgcattcaagtcacagagttgaacattcgctttcttagagcacgttggaaacactctttttgtagtgtctggaagtggacatttggagcgctttgatgcctttggtgaaaaagggaatgtcttcccataaaaactagacagaagcattctcagaaacttgtttgtgatgtgtctacccagctaaaggagttgaacatttctattgatagagcagttttgaaacactctttttgtggaaaatgcaggtggatatttggatagcttggaggatttcgtgggaagcgggaattcaaataaaaagtagacagcagcattctcagaaatttctttctgatgtctgcattcaactcatagagttgaagattccctttcatagagcaggtttgaaacagtctttctggaatatctggatgtggacatttggagcgctttgatgcctacggtgaaaaagtaaatatcttcccataaaaacgagacagaaggattctgagaaacaagtttgtgatgtgtgtactcagctaacagagtggaacctttctttttacagagcagctttgaaactctatttttgtggattctgcaaattgatatttagattgctttaacgatatcgttggaaaagggaatatcgtcatacaaaatctagacagaagcattctcacaaacttctttgtgatgtgtgtcctcaactaacagacttgaacctttcttttgatgcagcagtttggaaacacccttttggtagaaactgtaagtggatatttggatagctctaacgatttcgttggaaacgggaatatcatcatctaaaatctagacagaagcactattagaaactacttggtgatatctgcattcaagtcacagagttgaacattcccttactttgagcacgtttgaaacactctttgggaagaatctggaagtggacatttggagcgctttgatgcctttggtgaaaaggaaacgtcttccaataaaagccagacagaagcattctcagaaacttgtttgtgatgtgtgtactcaactaaaggagttgaacctttctattgatagagcagttttgaaacactctttttgtggattctgcaagtggatatttggattgctttgaggatttcgttggaagcgggaattcatataaaaactagacagcagcattcccagaaatttctttcggatatttccattcaactcatagagatgaacatggcctttcatagagcaggtttgaaacactctttttgtagtttgtggaagtggacatttcgatcgccttgacgcctacggtgaaaaaggaaatatcttcccataaaaaatagacagaagcattctcagaaacttgttggtgatatgtgtcctcaactaacagagttgaactttgccattgatagagagcagttttgaaacactcttttgcctgaatctgcaagtggatatttggatagcttggaggatttcgttggaagcgggaattcaaataaaaggtagacagcagcattctcagaaatttctttctgatgtctgcattcaactcatagagttgaagattccctttcatagagcaggtttgaaaaactctttctgtactatctggatgtagacatttggagcgctttgatgcctacggtgaaaaagtaaatatcttcccataaaaacgagacagaaggattctgagaaacaagtttgtgatgtgtgtactcggctaacagagtggaacctctcttttgatgcagcagtttggaaacactctttttgtagaaactgtaagtggatatttggatagctctaatgatttcgttggaaacgggaatatcatcatctaaaatctagacagaagccgtctcagaaactactttgtgatatctgcattcaagtcacagagttgaacattcgctttcttagagcacgttggaaacactctttttgtagtgtctggaagtggacatttggagcgctttgatgcctttggtgaaaaagggaatgtcttcccataaaaactagacagaagcattctcagaaacttgtttgtgatgtgtgtacccagctaaaggagttgaacatttctattgatagagcagttttgaaacactctttttgtggaaaatgcaagtggatatttggatagcttggaggatttcgttggaagcgggaattcaaataaaaggtagacagcagcattctcagaaatttctttctgatgtctgcattcaactcatagagttgaagattccctttcatagaggaggtttgaaacactctttctggagtatctggacgtggacatttggagcgctttgatgcctatggtgaaaaagtaaatatcttcccataaaaacgagacagaagctttctcagaaacttctttgtgatgtgtgtcctcaactaacagagttgaacctttcttttgatgcagcagtttggaaacacactttctgtagaaactgtaagtggatatttgggtaggtctaacgatatcgttggaaacgggaatatcttcatctaaagtatacacagaagcagtctcagaaactactttgtgatatctgcattccagtcacagggttgaaaactcccttacttagagcaggtttgaaacactctttttgtagaatctggaagtggacatttggagcgctttgatgcctttggtgaaaaaggaaatgtcttcccttaaaaagtagacagaagcattttcagaaacttgtttgtgatgtgtgtacccagccaaaggagttgaacatttctattgatagagcagttttgaaacactctttttgtggaaaatgcaggtggatatttggatagcttggaggatttcgttggaagcgggaattcaaataaaaggtagacagcagcagcattctcagaaatttccttctgatgtctgcattcaactcatagagttgaagactccctttcataaagcaggtttgaaacactctttctggagtatctggatgtggacatttggagcgcttggatgcctacggtgaaaaagtaaatatcttcccataaaaacgagacagaaggattctgagaaacaagtttgtgatgtgtgtactcagctaacagagtggaacctttctttttacagagcagctttgaaactctatttttgtggattctgcaaattgatatttagattgctttaacgatatcgttggaaaagggaatatcctcatacaaaatatagacagaagcattctcacaaacttctttgtgatgtgtgtcctcaactaacagagttgaacctttcttttgatgcagcaatttggaaacacccttttggtagaaactgtaactggatatttggatagctgctaacgatttcgttggaaaagggaatatcatcatctaaaatgtaggcagaaagcactattagaaactacttggtgatatctgcattcaagtcaaagagttgaacattcccttactttgagcacgtttgaaacactcttttggaagaatctggaagtggacatttggagcgctttgatgcctttggtgaaaaggaaacgtcttccaataaaagccagacagaagcattctcagaaacatgttcgtggtgtgtgtactcaactaaaagagttgaacctttctattgatagagcagttttgaaacactctttttgtggattctgcaagtggatatttggattgctttgaggatttcgttggaagcgggaattcgtataaacactagacagcagcattcccagaaatttctttcggatatttccattcaactcatagagatgaacatggcctttcatagagcaggtttgaaacactctttttgtagtttgtggaagtggacatttcgatcgccttgaccgcctacggtgaaaaaggaaatatcttcccataaaaaatagacagaagcattctcagaaacttgttggtgatatgtgtcctcaactaacacagttgaactttgccattgatagagagcagttttgaaacactctttttgtggaatctgcaagtggatatttggatagcttggaggatttcgttggaagcgggaattcaaataaaaggtagacagcaggattctgagaaacaagtttgtgatgtgtgtactcagctaacagagtggaacctctcttttgatgcagcagtttggaaacactctttttgtagaaactgtaagtggatatttggatagctctaatgatttcgttggaaacgggaatatcatcatctaaaatctagacagaagccctctcagaaactactttgtgatatctgcattcaagtcacagagttgaacattcggtttcttagagcacgtttgaaacacactttttgtagtgtctggaagtggacatttggagcgctttgatgcctttggtgaaaaagggaatgtcttcccataaaaactagacagaagcattctcagaaacttgtttgtgatgtgtgcacccagctaaaggagttgaacatttctattgatagagcagttttgaagcactctttttgtggaaaatgcaagtggatatttggatagcttggaggatttcgttggaagcgggagttcaaataaaaggtagacagcaagcattctcagaaatttctttctgatgtctgcattcaactcatagagttgaagattccctttcatagagcaggtttgaaacactctttctggagtatctggatgtggacatttggagcgctttgatgcctacggtgaaaaagtaaatatcttcccataaaaacgagacagaaggattctcagaagcaagtttgtgatgtgtgtactcagctaacagagtggaacctttctttttacagagcagctttgaaactgtttttgtggatcctgcaaattgatatttgtgttgatttaaagatatcattggaaaagggaatatcttcatacaaaatctagacagaagcattctcacaaacttctttgtgacgtgtgtcctcaactaacagagttgaacctttcttttgatgcagcagtttggaaacactgtttttgtagaaactgtaagtggatatttggatagctctaacgatttcgttggaaacgggaatatcatcatctaaaatctagacagaagcactattagaaactacttggtgatatctgcattcaagtcacagagttgaacattcccttactttgagcacgtttcaaacactcttttggaagaatctggaagtggacatttggagcgctttgatgcctttggtgaaaaggaaacgtcttccaataaaagccagacagaagcattctcagaaacttgtttgtgatgtgtgtactcaactaaaagagttgaacctttctattgatagagcagttttgaaacactctttttgtggattctgcaagtggatattaggattgctttgaggatttcgttggaagcgggaattcgtataaaaactagacagcagcattcccagaaatttctttcggatatttccattcgactcatagagatgaacatggcctttcatagagcaggtttgaaacactctttttgtagtttgtggaagtggacatttcgatcgccttgacgcctacggtgaaaaaggaaatatcttcccataaaaaatagacagaagcattctcagaaacttgttggtgatatgtgtcctcaactaacagagttgaactttgccattgatagagagcagttttgaaacactctttttgtggaatctgcaagtggatatttggatagcttggaggatttcgttggaagcgggaattcaaataaaaggtagacagcagcattctcagaaatttctttctgatgtctgcattcaactcatagagttgaagattccctttcatagagcaggtttgaaacactctttctggagtatctggacgtggacatttggagcgctttgatgcctacggtgaaaaagtaaatatcttcccataaaaacgagacagaaggattctgagaaacaagtttgtgatgtgtgtactcagctaacagagtggaacctttctttttacagagcagctttgaaactctatttttgtggattctgcaaattgatatttagattgctttaacgatatcgttggaaaagggaatatcgtcatacaaaatctagacacaagcactctcagaaactactttgtgatatctgcattcaagtcacagagttgaacattcgctttcttagagcacgtttgaaacactctttttgtagtgtctggaagtggacatttggagcactttgatgcctttggtgaaaaagggaacgtcttcccataaaaactagacagaagcattctcagaaacttgtttgtgatgtgtgtacccagccaaaggagttgaacatttctattgatagagcagttttgaaacactctttttgtggaaaatgcaggtggatatttggatagcttgaaggatttcgttggaagcgggaattcaaataaaaggtagacagccagcattctcagaaatttctttctgatgtctgcattcaactcatagagttgaagattccctttcatagagcaggtttgaaacactctttctggagtatctggatgtggacatttggagcgctttgatgcctacggtgaaaaagtaaatatcttcccagaaaaacgagacagaaaggattctcagaaacaagtttgtgatgtgtgtactcagctaacagagtggaacctttctttttacagagcagctttgaaactctattgttgtggattctgcaaattgatatttagattgctttaacgatatcgttggaaaagggaataccgtcatacaaaatctagacagaagcattctcacaaacttctttgtgatgtgtgtcctcaactaacagagttgaacctttcttttgatgcagcaatttggaagcacccttttggtagaaactgtaactggatatttggatagctctaacgatttcgttggaaacgggaatatcatcatctaaaatgtagacagaagcactattagaaactacttggtgatatctgcattcaagtcacagagttgaacattcccttactttgagcacgtttgaaacactcttttggaagaatctggaagtggacatttggagcgctttgatgcctttggtgaaaaggaaacgtcttccaataaaagccacacagaagcattctcagaaacttgttcgtgatgtgtgtactcaactaaaagagttgaacctttctattgatagagcagttttgaaacactctttttgtggattctgcaagtggatatttggattgctttgaggatttcgttggaagcgggaattcgtataaacactagacagcaacattcccagaaatttctttcggatatttccattcaactcatagagatgaacatggcctttcatattgaaacactctttttgtagtttgtgtaagtggacatttcgatcgccttgatgcctacggtgaaaaaggaaatatcttcccataaaaaattgacagaagcattctcagaaaattgttggtgatatgtgtcctcaactaacagagttgaactttgccattgatagagagcagttttgaaacactctttttgtggaatctgcaagtggatatttggatagcttggaggatttcgttggaagcgggaattcaaattaaaggtagacagcagcattctcagaaatttctttctgatgtctgcattcaactcatagagttgaagattccctttcatagagcaggtttgaaacactctttctggagtatctggatgtggacatttggagcgctttgatgcctacggtgaaaaagtataatcttcccataaaaacgagacagaaggattctgagaaacaagtttgtgatgtgtgtactcagctaacagagtggaacctctcttttgatgcagcagtttggaaacactctttttgtagaaaccgtaagtggatatttggatagctctaatgatttcgttggaaacgggaatatcatcatctaaaatctagacagaagccctctcagaaactactttgtgatatctgcattcaagtcagagagttgaacattcgctttcttagagcacgtttgaaacactctttttgtagtgtcaggaagtggacatttggagcgctttgatgcctttggtgaaacagggaatgtcttcccataaaaactagacagaagcattctcagaaacttgtttgtgatgtgtgtacccagctaaaggagttgaacatttccattgatagagcagttttgaaacactctttttgtggaaaatgcaagtggatatttggatagcttggaggatttcattggaagcgggaattcaaataaaaggtagacaggagcattctcagaaatttctttctgatgtctgcattcaactcatagagttgaagattccctttcatagagcaggtttgaaacactcgttctggagtatctggatgtggacatttggagcgctttgatgcctacggtggaaaagaaaatatcttcccataaaaacgagacagaaggattctcagaaacaagtttgtgatgtgtgtactcagctaacagagtggatccttcctttttacagagcagctttgaaactctatttctgtggattctgcaaattgatatttgggttgatttaacgacatcgttggaaaagggaatatcttcatacaaaatctagacagaagcattctcacaaacttctttgtgacgtgtgtcctcaactaacagagttgaacctttcttttgatgcagcagtttggaaacactctttttgtagaaactgtaagtggatatttggatagctctaacgatttcgttggaaacgggaatatcatcatctaaaatctagacagaagcactattagaaactacttggtgatatctgcattcaagtcacagagttgaacattcccttactttgagcacgtttcaaacactcttttggaagaatctggaagtggacatttggagcgctttgatgcctttggtgaaaaggaaacgtcttacaataaaagccagacagaagcattctgagaaacttgttcgtgatgtgtgtactcaactaaaagagttgaacctttctattgatagggcagttttgaaacactctttttgtggattctgcaagtggatatttggattgctttgaggatttcgttggaagcgggaattcgtataaacactagacagcagcattcccagaaatttctttcggatatttccattcaactcatagagatgaacatggcctttcatagagcaggtttgaaacactctttttgtagtttgtggaagtggacatttcgatcgccttgacgcctacggtgaaaaaggaaatatcttcccataaaaaatagacagaagcattctcagaaacttgttggtgatatgtgtcctcaactaacagagttgaactttgccattgatagagagcagtttttgaaacactctttttgtggaatctgcaagtggatatttggatagcttggaggatttcgttggaagcgggaattcaaataaaaggtagacagcagcattctcagaaatttctttctgatgtctgcattcaactcatagagttgaagattccctttcatagagcaggtttgaaacactccttctggagtatctggatgtggacatttggagcgctttgatgcctacggtgaaaaagtaaatatcttcccagaaaaacgagacagaaggattctgagaaacaagtttgtgatgtgtgtactcagctaacagagtggaacctctcttttgatgcagcagtttggaaacactctttttgtagaaactgtaagtggatatttggatagatctaatgatttcgttggaaacgggaatatcatcatctaaaatctagacagaagccctctcagaaactactttgtgatatctgcattcaagtcacagagttgaacattcggtttcttagagcacgttggaaacactccttttgtagtgtctggaagtggacatttggagcgctttgatgcctttggtgaaaaagggaatgtcttcccataaaaactagacagaagcattctcagaaacttgtttgtgatgtgtgtacccagctaaaggagttgaacatttctattgatagagcagttttgaaacactctttttgtggaaaatgcaagtggatatttggatagcttggaggatatcgttggaagcgggaattcaataaaaggtagacagcagcattctcagaaatttctttctgatgtctgcattcaactcatagagttgaacattccctttcatagagcaggtttgaaacactgtttctggagtatctggatgtggacatttggagcgctttgatgcctacggtgaaaaagtaaatatcttcccataaaaacgagacagaaggattctgagagacaagtttgtgatgtgtgtactcagctaacagagtggaacctttctttttacagagcagctttgaaactctatttttgtggattctgcaaatgcatatttagattgctttaatgatatcgctggaaaagggaatatggtcatacaaaatctagacagaagctttctcacaaacttctttgtgatgtgtgtcctcaactaacagagttgaacctttcttttgatgcagcagtttggaaacactctttttgtagaaactgtaagtggatatttggatagctataacgatttcgttggaaacgggaatatcatcatctaaaatctagacagaagcactattagaaactacctggtgatatctgcattcaagtcacagagtagaacattcccttacttcgagcacgtttgaaacactcttttggaagaatctggaagtggacatttggagcgctttgatgcctttggtgaaaaggaaacgtcttccaataaaagccagacagaagcattctcagaaacttgttggtgatgtgtgtactcaactaaaagagttgaacctttctattgatagagcagttttgaaacactctttttgtggattctgcaagtggatatttggattgctttgaggatttcgttggaagcgggaattcgtataaacactagacagcagcattcccagaaatttctttcggatatttccattcaactcatagagatgaacatggcctttcatagagcaggtttgaaacactctttttgtagtttgtggaagtggacatttcgatcgccttgacgcctacggtgaaaaaggaaatatcttcccataaaaaatagacagaagcattctcagaaacttgttggtgatatgtgtcctcaactaacagacttgaactttgccattgatagagagcagttttgaaacactctttttgtggaatctgcaagtggatatttggatagcttggaggatttcgttggaagcgggaattcaaataaaaggtagacagcagcattctcagaaatttccttctgatgtttgcattcaactcatagagttgaacattccctttcatagagcaggtttgagacactctttctgtattatctggaagtggacatttggaaagctttgatgcctacggtgaaaaagtaaatatcttcccataaaagctagacagaaggattctgagaaacaagtttgtgatgtgtgtactcagctaacagagtggaacctctgttttgatgcagcagtttggaaacactctttttgtagaaactgtaagtggatatttggatagctgctaatgatttcgttggaaacgggaatatcatcatctaaaatctagacagaagccctctcagaaactactttgtgatatctgcattcaagtcacagagttgaacattcgctttcttagagcacgttggaaacactctttttgtagtgtctggaagtggacatttggagcgctttgatgcctttggtgaaaaagggaatgtctacccataaaaactagacagaagcattctcagaaacttgtttgtgatgtgtctacccagctaaaggagttgaacatttctattgatagagcagttttgaaacactctttttgtggaaaatgcaagtggatatttggatagcttggaggatttcgttggaagagggaattcaaataaaaggtagacagcagcattctcagaaatttctttctgatgtctgcattcaactcatagagttgaagattccctttcatagagcaggtttgaaacactctttctggagtatctggatgtggacatttggagcgctttgatgcctacggtgaaaaagtaaatatcttcccataaaaacgagacagaaggattctcagaaacaagtttgtgatgtgtgtactcagctaacagagtggaacctttatttttacagagcagctttgaaactctatttttgtggattctgcaaattgatatttagattgctttaacgatatcgttggaaaagggaatatcgtcatacaaaatctagacagaagcattctcacaaacttctttgtgatgtgtgtcctcaactaacagagttgaacctttcttttgatgcagcaatttggaaacacccttttggtagaaactgtaactggatatttggatagctctaacgatttcgttggaaacgggaatatcatcatctaaaatgtagacagaagcactattagaaactacttggtgatatctgcattcaagtcacagagttgaacattcccttactttgagcacgtttcaaacactcttttggaagaatctggaagtggacatttggagcgctttgatgcctttggtgaaaaggaaacgtcttccaataaaagccagacagaagcattctcagaaacttgtttgtgatgtgtgtactcaactaaaagagttgaacctttctattgatagagcagttttgaaacactctttttgtggattctgcaagtggatatttggattgctttgaggatttcgttggaagcgggaattcgtataaaaactagacagcagcattcccagaaatttctttcggatatttccattcaactcatagagatgaacatggcctttcatagagcaggtttgaaacactctttttgtagtttgtggaagtggacatttcgatcgccttgacgcctacggtgaaaacggaaatatcttcccataaaaaatagacagaaagcattctcagaaaacttgttggtgatatgtgtcctcaactaacagagttgaactttgccattgatagagagcagttttgaaacactctttttgtggaatctgcaagtggatatttggatagcttggaggatttcgttggaagcgggaattcaaataaaaggtagacagcagcattctcagaaatttctttctgatgtctgaatttaactcatagagttgaagattccctttcatagagcaggtttgaaacactctttctggagtatctggatgtggacatttggagcgctttgatgcctacggtgaaaaagtaaatatcttcccataaaaaagagacagaaggattctgagaaacaagtttgtgatgtgtgtactcagctaacagagtggaacctctcttttgatgcagcagtttggaaacactctttttgtagaaactgtaagtggatatttggatagctctaatgatttcgttggaaacgggaatatcatcatctaaaatctagacagaagccctctcagaaactactttgtgatatctgcattcaagtcacagagttgaacattcgctttcttagggcacgttggaaacactctttttgtagtgtctggaagtggacatttggagcgctttgatgcctttggtgaaaaagggaatgtcttcccataaaaactagacagaagcattctcagaaacttgtttgtgatgtgtgtacccagctaaaggagttgaacatttccattgatagagcagttttgaaacactctttttgtggaaaatgcaagtggatatttggatagcttggaggatttcgttggaagcgggaattcaaataaaaggtagacagcagcattctcagaaatttctttctgatgtctgcattcaactcatagagttgaagattccctttcatagagcaggtttgaaacactctttctggagtatctggatgtggacatttggagcgctttgatgcctacggtggaaaaagtaaatatcttcccataaaaacgagacagaaggattctgagaaacaagtttgtgatgtgtgtactcagctaacagagtggaacctctcttttgatgcagcagtttggaaacactctttttgtagaaactgtaagtggatatttggatagctctaatgatttcgttggaaacgggaatatcatcatctaaaatctagacagaagcactctcagaaactactttttgatatctgcattcaagtcacagagttgaacattcgctttcttagagcacttttgaaacactctttttgtagtatctggaagtggacatttggagctctttgatgcctttggtgaaaaaggaaatgtcttcccataaaaactagacagaagctttctcagaaacttgtttgtgatgtgtgtacccagcgaaaggagttgaacatttctattgatagagaagttttgaaacactctttttgtggaatctgcaagtggatatttggatagcttggaggttttcgttggaagcgggaattcaaataaaaggtagacagcagcattctcagaaatttctttctgatgtctgcattcaactcatagagttgaagattccctttcatagagcaggtttgaaacactcgttctggagtatctggatgtggacatttggagcgctttgatgcctacagtggaaaagtaaatatcttcccataaaaacgagacagaaggattctcagaatcaagtttgtgatgtgtgtactcagctaacagagtggaacctttctttttacagagcagctttgaaactctatttttgtggattctgcaaattgatatttagattgctttaacgatatcgttggaaaagggaatatcgtcatacaaaatctagacagaagcattctcacaaacttctttgtgatgtgtgtcctcaactaacagagttgaacctttcttttgatgcagcaatttggaaacacccttttggtagaaactgtaactggatatttggatagctctaacgatttcgttggaaacgggaatatcatcatctaaaatctagacagaagcactattagaaactacctggtgatatctgcattcaagtcacagagtagaacattcccttacttcgagcacgtttgaaacactcttttggaagaatctggaagtggacatttggagcgctttgatgcctttggtgaaaaaggaaacgtcttctaataaaaaccagacagaagcattctcagaaacttgtttgtgatgtgtgtactcaactaaaagagttgaacctttctattgatagagcagttttgaaacactctttttgtggattctgcaagtggatatttggattgctttgaggatttcgttggaagcgggaattcgtataaacactagacagcagaattcccagaaatttctttcggatatttccattcaactcatagagatgaacatggcctttcatagagcaggtttgaaacactctttttgtagtttgtggaagtggacatttcgatcgccttgacacctacgctgaaaaaggaaatatcttcccataaaaaatagacagaagcattctcagaaacttgttggtgatatgtgtcctcaactaacagagttgaactttgccattgatagagagcagttttcaaacactctttttgtggaatctgcaagtggatatttggatagcttggaggatttcgttggaagcgggaattcaaataaaaggtagacagcagcattctcagaaatttctttctgatgtctgcattcaactcatagagttgaagattccctttcatagagcaggtttgaaacactctttctggagtatctggatgtggacatttggagcgctttgatgcctacggtggaaaagtaaatatcttcccataaaaacgagacagaaggattctgagaaacaagtttgtgatgtgtgtactcagctaacagagtggaacctctcttttgatgcagcagtttggaaacattctttttgtagaaactgtaagtggatatttggatagctctaatgatttcgttggaaacgggaatatcatcatctaaaatctagacagaagcactctcagaaactactttgtgatatctgcattcaagtcacagagttgaacattcgctttcttagagcacgttggaaacactctttttgtagtgtctggaagtggacatttggagcgctttgatgcctttggtgaaaaagggaacgtcttcccataaaaactagacagaagcattctcagaaacttgtttgtgatgtgtgtacccagccaaaggagttgaacatttctattgatagagcagttttgaaacactctttttgtggaaaatgcaagtggatatttggatagcttggaggatttcgttggaagcgggaattcaaataaaaggtagacagcagcattctcagaaatttctttctgatgtctgcattcaactcatagagttgaagattccctttcatagagcaggtttgaaacactcgttctcgagtatccggatgtggacatttggagcgctttgatgcctacggtggaaaagtaaatatcttcccataaaaacgagacagaaggattctcagaaacaagtttgtgatgtgtgtactcagctaacagagtggaacctttctttttacagagcagctttgaaactctatttttgtggattctgcaaattgatatttagattgctttaacgatatcgttggaaaagggaatattgtcatacaaaatctggacagaagcattctcacaaacttctttgtgatgtgtgtcctcaactaacagagttgaacctttcttttgatgcagcaatttggaaacacccttttggtagaaactgtaactggatatttggatagctctaacgatttcgttggaaacgggaatatcatcatctaaaatgtagacagaagcactattagaaactacttggtgatatctgcattcaagtcacagagttgaacattcccttacttcgaccacgtttgaaacactcttttggaagaatctggaagtggacatttggagcgctttgatgcctttggtgaaaaggaaacgtcttccaataaaagccagacagaagcattctcagaaacttgttcgtgttgtgtgtactcaactaaaagagttgaacctttctattgatagagcagttttgaaaccctctttttgtggattctgcaagtggatatttggattgctttgaggatttcgttggaagcgggaattcgtataaacactagacagcagcattcccagaaatttctttcggatatttccattcaactcatagagatgaacatggcctttcatagagcaggtttgaaacactctttttgtagtttgtggaagtggacatttcgatcgccttgacgcctacggtgaaaaaggaaatatcttcccataaaaaatagacagaagcattctcagaaacttgttggtgatatgtgtcctcaactaacagagttgaactttgccattgatagagagcagttttgaaacactctttttgtggaatctgcaagtggatatttggatagcttggaggagttcgttggaagcggaaattcaaataaaaggtagacagcaggattctcagaaacaagtttgtgatgtgtgtactcagctaacagagtggaacctctcttttgatccagcagtttggaaacactctttttgtagaaactgtaagtggatatttggatagctctaatgatttcgttggaaacgggaatatcatcatctaaaatctagacagaagccctctcagaaactactttgtgatatctgcattcaagtcacagagttgaacattcgctttcttagagcacgtttgaaacactctttttgtagtgtctggaagtggacatttggagcgctttgattcctttggtgaaaaagggaatgtcttcccataaaaactagacagaaacattctcagagacttgtttgtgatgtgtgtacccagccaaaggagttgaacatttctattgatagagcagttttgaaacactcttgttgtggaaaatgcaggtggatatttggatagcttggaggatttcgttggaagcgggaattcaaataaaaggtagacagcagcattctcagaaatttctttctgatgtctgcattcaactcatagagttgaagattccctttcatagagcaggtttgaaacactctttctggagtatctggatgtggacatttggagcgctttgatgcctacgttggaaaagtaaatatcttcccataaaaacgagacagaaggattctcagaaacaagtttctgatgtgtgtactcagctaacagagtggaacctttctttttacagagcagctttgaaactctatttttgtggattctgcaaattgatatttagattgctttaacgatatcgttggaaaagggaatatcgtcatacaaaatctggacagaagcattctcacaaacttctttgtgatgtgtgtcctcaactaacagagttgaaactttcttttgatgcagcagtttggaaacactctttttgtagaaactgtaagtggatatttggatagctctaatgatttcgttggaaacgggaatatcatcatctaaaatctagacagaagcactattagaaactacttggtgatatctgcattcaagtcacagagttgaacattcccttactttgagcacgtttgaaacactcttttggaaaaatctggaagtggacatttggagcgctttgatgcctttggtgaaaaggaaacgtcttccaataaaagccagacaaaagcattctcagaaacttgttcgtgatgtgtgtactcaactaaaagagttgaacctttctattgatagagcagttttgaaacactctttttgtggattctgcaagtggatatttggattgctttgaggatttcgttggaagcgggaattcgtataaacactagacagcagcattcccagaaatttctttcggatatttccattcaactcatagagatgaacatggcctttcatagagcaggtttgaaacactcattttgtagtttctggaagtggacatttcgatcgccttgacgcctacggtgaaaaaggaaatatcttcccataaaaaatagacagaagcattctcagaaacttgttggtgatatgtgtcctcaactaacagagttgaactttgccattgatagagagcagttttgaaacactctttttgtggaatctgcaagtggatatttggatagcttggaggatttcgttggaagcgggaattcaaataaaaggtagacagcagcattctcagaaattcctttctgatgtttgcattcaactcatagagttgaacattccctttaatagagcaggtttgaaacactctttctgtactatctggatgtggacatttggagcgctttgatgcctacggtgaaaaaggaaatgtcttcccataaaaaattgaagaaggattctcagaaacaagtttgtgatgtgcgtactcagctaacagagtggaacctctcttctgatgcagcagtttggaaacactctttttgtagaaactgtaagtggatatttggatagctctaatgatttcgttggaaacgggaatatcatcatctaaaatctagacagaagccctctcagaaactactttgtgatatctgcattcaagtcacaggagttgaacattcgctttcttagagcacgtttgaaacactctttttgtagtgtctggaagtggacatttggagcgctttgatgcctttggtgaaaaagggaacgtcttcccataaaaactagacagaagcattctcagaaacttgtttgtgatgtgtgcacccagctaaaggagttgaacatttattgatagagcagttttgaagcactctttttgtggaaaatgcaagtggatatttggatagcttggaggatttcgttggaagtgggagttcaaataaaaggtagacagcagcattctcagaaatttctttctgatgtctgcattcaactcatagagttgaagattccctttcatagagcaggtttgaaacactctttctgcagtatctggatgtggacatttggagcgctttgatgcctacggtgaaaaagtaaatatcttcccataaaaacgagacagaaggattctcagaaacaagtttgtgatgtgtgtactcagctaacagagtggaacctttctttttacagagcagctttgaaactctatttttgtggattctgcaaatggatatttagattgctttaatgatatcgctggaaaagggaatatggtcatacaaaatatagacagataagcattctcacaaacttctttgtgatgtgtgtcctcaactaacagagttgaacctttcttttgatgcagcaatttggaaacacccttttggtagaaactgtaactggatatttggatagctctaacgatttcgttggaaacgggaatatcatcatctaaaatgtagacagaagcactattagaaactacttggtgatatctgcattcaagtcacagagtagaacattcccttacttcgagcacttttgaaacactcttttggaagaatctggaagtggacatttggagcgctttgatgcctttggtgaaaaggaaacgtcttccaataaaagccagacagaagcattctcagaaacttgtttgtgatgtgtgtactcaactaaaagagttgaacctttctattgatagagcagttttgaaacactctttttgtggattctgcaagtggatatttggattgctttgaggatttcgttggaagcgggaattcgtataaacactagacagcagcattcccagaaatttctttcggatatatccattcaactcatagagatgaacatggcctttcatagagcaggtttgcaacactctttttgtagtttgtggaagtggacatttcgatcgccttgacgcctacggtgaaaaaggaaatatcttcccataaaaaatagacagaagcattctcaaaaacttgttggtgatatgtgtcctcaactaacagagttgaactttgccattgatagagagcagttttgaaacactctttttgtggaatctgcaagtggatatttggatagcttgaaggatttcgttggaagcgggaattcaaataaaaggtagacagcagcattctcagtaaatttctttctgatgtctgcattcaactcatagagttgaagattccctttcatagagcaggtttgaaacactctttctggagtatctggatgtggacatttggagcgctttgatgcctacggtgaaaaagtaaatatcttcccagaaaaacgagacagaaggattctgagaaacaagtttgtgatgtgtgtactcagctaacagagtggaacctctcttttgatgcagcagtttggaaacactctttttgtagaaactgtaagtggatatttggatagctctaatgatttcgttggaaacgggaatatcatcatctaaaatctagacagaagccctctcagaaactactttgtgatatctgaattcaagtcacagagttgaacattcgctttcttagagcacgttggaaacactctttttgtagtgtctggaagtggacatttggagcgctttgatgcctttggtgaaaaagggaatgtcttcccataaaaactagacagaagcattctcagaaacttgtttgtgatgtgtgtacccagccaaaggagatgaacatttctattgatagagcagttttgaaactctctttttgtggaaaatgcaggtggatatttggatagcttggaggatttcgttggaagcgggaattcaaataaaaggtagacagcagcattctcagaaatttctttctgattctgcattcaactcatagagttgaagattccctttcatagagcaggtttgaaacactcgttctggagtatctggatgtggacatttggagcgctttgatgcctacagtggaaaagtaaatatcttcccataaaaacgagacagaaggattctcagaaacaagtttgtgatgtgtgtactcagctaacagagtggaacctttctttttacagagcagctttgaaactctagttttgtggattctgcaaattgatatttagattgctttaacgatatcgttggaaaagggaatatcctcatacaaaatctagacagaagcattctcacaaacttctttgtgatgtgtgtcctcaactaacagagttgaacctttcttttgatgcagcaatttggaaacacccttttggtagaaactgtaactggatatttggatagctctaacgatttcgttggaaacgggaatatcatcatctaaaatctagacagaagcactattagaaactacttggtgatatctgcattcaaatcacagagtagaacattcccttacttcgagcacgtttgaaacactcttttggaagaatctgaaagtggacatttggagcgctttgatgcctttggtgaaaaggaaacgtcttccaataaaagccagacagaagcattctcagaaacttgtttgtgatgtgtgtactcaactaaaagagttgaacctttctattgatagagcagttttgaaacactctttttgtggattctgcaagtggatatttggattgctttgaggatttcgttggaagcgggaattcgtataaaaactagacagcagcattcccagaaatttctttcggatatttccattcgactcatagagatgaacatggcctttcatagagcaggtttgaaacactctttttgtagtttgtggaagtggacatttcgatcgccttgacgcctacggtgaaaaaggaaatatcttcccataaaaaatagacagaagcattctcagaaacttgttggtgataggtgtcctcaactaacagagttgaactttgccattgatagagagcagttttgaaacactctttttgtggaatctgcaagtggatatttggatagcttggaggatttcgttggaagcgggaattcaaataaaaggtagacagcagcattctcagaaatttctttctgatgtctgcattcaactcatagagttgaacattccctttcatagagcaggtttgaaacactctttctggagtatctggatgtggacatttggagcgctttgatgcctacggtgaaaaagtataatcttcccataaaaacgagacagaaggattctgagaaacaagtttgtgatgtgtgtactcagctaacagagtggaacctctcttttgatgcagcagtttggaaacactctttttgtagaaactgtaagtggatatttggatagctctaatgatttcgttggaaacgggaatatcatcatctaaaatctagacagaagccctctcagaaactactttgtgatatctgcattcaactcacagagttgaacattcggtttcttagagcacgtttgaaacactctttttgtagtgtctggaagtggacatttggagcgctttgatgcctttggtgaaaaagggaatgtcttcccataaaaactagacagaagcattctcagaaacttgtttgtgatgtgtgtacccagccaaaggagttgaacatttctattgatagagcagttttgaaacactcttgttgtggaaaatgcaggtggatatttggatagcttggaggatttcgttggaagcgggaattcaaattaaaggtagacagcagcattctcagaaatttctttctgatgtctgcattcaactcatagagttgaagattccctttcatagagcaggtttgaaacacactttctggagtatctggatgtggacatttggagcgctttgatgcctacggtgaaaaagtaaatatcttcccataaaaacgagacagaaggattctgagaaacaagtttgtgatgtgtgtactcagctaacagagtggaacctctgttttgatgcagcagtttggaaacactctttttgtagaaactgtaagtggatatttggatagctctaatgatttcgttggaaacgggaatatcatcatctaaaatctagacagaagcactctcagaaactactttgtgatatctgcattcaagtcacagagttgaacattcgctttcttagagcacgtttgaaacactgtttttgtagtgtctggaagtggacatttggagcgctttgatgcctttggtgaaaaagggaacgtcttcccataaaaactagacagaagcattctcagaaacttgtttgtgatgtgtgcacccagctaaaggagttgaacatttattgatagagcagttttgaagcactttttttgtggaaaatgcaagtggatatttggatagcttggaggatttcgttggaagcgggagttcaaataaaaggtagacagcagcattctcagaaatttctttctgatgtctgcattcaactcatagagttgaagattccctttcatagagcaggtttgaaacactctttctggagtatctggatgtggacatttggagcgctttgatgcctacggtgaaaaagtaaatatcttcccataaaaacgagacagaaggattctgagaaacaagtttgtgatgtgtgtactcagctaacagagtggaacctttctttttacagagcagctttgaaactctatttttgtggattctgcaaatggatatttagattgctttaatgatatcgttggaaaagggaatatcgtcatacaaaatctagacagaagcattctcacaaacttctttgtgatgtgtgtcctcaactaacagagttgaacctttcttttgatgcagcagtttggaaacactctttttgtagcaactgtaagtggatatttggatagctctaacgatttcgttggaaacgggaatatcatcatctaaaatctagacagaagcactattagaaactacttggtgatatctgcattcaagtcacagagttgaacattcccttactttgagcacgtttgaaacactcttttggaagaatctggaagtggacatttggagcgctttgatgcctttggtgaaaaggaaacgtctcccaacaaaagccagacagaagcattctcagaaacttgtttgtgatgtgtgtactcaactaaaagagttgaacctttctattgatagagcagttttgaaacactctttttgtggattctgcaagtggatatttggattgctttgaggatttcgttggaagcgggaattcatataacaactagacagcagcattcccagaaatttctttcggatatttccattcaactcatagagatgaacatggcctttcatagagcaggtttgaaacactctttttgtagtttgtggaagtggacatttcgatcgccttgacgcctacggtgaaaaaggaagtatcttcccataaaaaatagacagaagaattctcagaaacttgtttgtgatgtgtatcctcaactgacagagttgaaccttgccattgatagatcagttttgaaacactctttttgtggaatctgcaagtggatatttggatagcctggaggatttcgttggaagcgggaattcaaataaaaggtagacagcagcattctcagaaatttctttgtgatgtttgcattcaactcatagagttgaacattccctttcatatagcaggtttgaaacactctttctgtactatctggatgtggacatttggaaagctttgatgcctacggtgaaaaagtaaatatcttcccataaaagctagacagaaggattctcggaaacaagtttgtgatgtgtgtactcagctaacagagtggaacctctcttctgatgcagcagtttggaaacactctttttgtagaaactgtaagtggatatttggatagctctaatgatttcgttggaaacgggaatatcatcatctaaaatctagacagaagccctctcagaaactactttgtgatatctgcattcaagtcacagagttgaacattcgctttcttagagcacgtttgaaacactctttttgtagtgtctggaagtggacatttggagcgctttgatgcctttggtgaaaaaggcaatgtcttcccataaaaactagacagaagcattctcagaaacttgtttgtgatgtgtgtacccagccaaaggagttgaacatttctattgatagagcagttttgaaacactcttgttgtggaaaatgcaggtggatatttggatagcttggaggatttcgttggaagtgggaattcaaataaaaggtagacagcaggattctgagagacaagtttgtgatgtgtgtactcagctaacagagtggaacctttctttttacagagcagctttgaaactctatttttgtggattctgcaaatggatatttagattgctttaatgatatcgctggaaaagggaatatggtcatacaaaatctagacagaagcattctcacaaacttctttgtgatgtgtgtcctcaactaacagagttgaacctttcttttgatgcagcaatttggaaacacccttttggtagaaactgtaactggatatttggatagctctagcgatttcgttggaaacgggaatatcatcatctaaaatctagacataagcactattagaaactacttggtgatatctgcattcaagtcacagagttgaacattcccttactttgagcacgtttcaaacactcttttggaagaatctggaagtggacatttggagcgctttgatgcctttggtgaaaaggaaacatcttccaataaaagccagacagaagcattctcagaaacttgtttgtgatgtgtgtactcaactaaaagagttgaacctttctattgatagagcagttttgaaacactctttttgtggattctgcaagtggatatttggattgctttgaggatttcgttggaagcgggaattcgtataaaaactagacagcagcattcccagaaatttctttcggatatttccattcaactcatagagatgaacatggcctttcatagagcaggtttgaaacactctttttgtagtttgtggaagtggacatttcgatcgccttgatgcctacagtgaaaaaggaaatatcttcccataaaaaatagacagaagcattctcagaaacttgttggtgatatgtgtcctcaactaacagagttgaactttgccattgatagagagcagttttgaaacactctttttgtggaatctgcaagtggatatttggatagcttggaggatttcgttggaagcgggaattcaaataaaaggtagacagcagcattctcagaaatttctttctgatgtctgcattcaactcatagagttgaagattccctttcatagagcaggtttgaaacactctttctggagtatctggatgtggacatttggagcgctttgatgcctacggtgcaaaagtaaatatcttcccataaaaacgagacagaaggattctgagaaacaagtttgtgatgtgtgtactcagctaacagattggaacctctcctttgatgcagcagtttggaaacactctttttgtagaaactgtaagtggatatttggatagctctaatgatttcgttggaaacgagaatatcatcatctaaaatctagacagaagccctctcagaaactactttgtgatatctgcattcaagtcacagagttgaacattcgctttcttagagcacgtttgaaacactctttttgtagtgtctggaagtggacatttggagcgctttgatgcctttggtgaaaaagggaatgtcttcccataaaaactagacagaagcattctcagaaacttgtttgtgatgtgtgcacccagctaaaggagttgaacatttattgatagagcagttttgaagcactctttttgtggaaaatgcaagtggatatttggatagcttggaggatttcgttggaagcgggagttcaaataaaaggtagacagcaagcattctcagaaatttctttctgatgtctgcattcaactcatagagttgaagattccctttcatagagcaggtttgaaacactctttctggagtatctggatgtggacatttggagcgctttgattcctacggtgaaaaagtaaaatatcttcccataaaaacgagacagaaggattctgagagacaagtttgtgatgtgtgtactcagctaacagagtggaacctttctttttacagagcagctttgaaactctatttttgtggattctgcaaatggatatttagattgctttaatgatatcgttggaaaagggaatatcgtcatacaaaatctggacagaagctttctcagaaacttctttgtgatgtgtgtcctcaactaacagagttgaacctttcttttgatgcagcagtttggaaacactctttttgtagaaactgtaagtggatatttggataggtctaacgatatcgttggaaacgggaatatcttcatctaaagtatacacagaagcactattagaaactacttggtgatatctgcattcaagtcacagagttgaacattcccttactttgagcacgtttgaaacactcttttggaagaatctggaagtggacatttggagcgctttgatgcctttggtgaaaaggaaacgtcttccaataaaagccagacagaagcattctcagaaacttgttcgtgatgtgtgtactcaactaaaagagttgaacctttctattgatagagcagttttgaaacactctttttgtggattctgcaagtggatttttggattgctttgaggatttcattggaagcgggaattcgtataaacactagacagcagcattcccagaaatttctttcggatatttccattcaactcatagagatgaacatggcctttcatagagcaggtttgaaaaactctttttgtagtttgtggaagtggacatttcgatcgccttgacgcctacggtgaaaaaggaaatatcttcccataaaaaatagacagaagcattctcagaaacttgttggtgatatgtgtcctcaactaacagagttgaactttgacattgatagagagccgttttgaaacactctttttgtggaaaatgcaagtggatatttggatagcttggaggatttcgttggaagcgggaattcaaataaaaggtagacagcaggattctcagaaacaagtttgtgatgtgtgtactcagctaacagagtggaacctctcttttgatgcagcagtttggaaacactctttttgtagaaactgtaagtggatatttggatagctctaatgatttcgttggaaacgggaatatcatcatctaaaatctagacagaagccctctcagaaactactttgtgatatctgcattcaagtcacagagttgaacattcggtttcttagagcacgtttgaaacactctttttgtagtgtctggaagtggacacttggagcgctttgatgcctttggtgaaaaagggaacgtcttcccataaaaactagacagaagcattctcagaaacttgtttgtgatgtgtgtaccccgctaaaggagtgaacatttctattgatagagcagttttgaaacactctttttgtggacaatgcaggtggatatttggatagcttggaggatttcgttggaagcgggaattcaaataaaaggtagacagcagcattctcagtaaatttctttctgatgtctgcattcaactcatagagttgaagattccctttcatagagcaggtttgaaacactcgttctggagtatctggatgtggacatttggagcgctttgatgcctacggtggaaaagtaaatatcttcccataaaaacgagacagaaggattctcagaaacaagtttgtgatgtgtgtactcagctaacagagtggaacctttctttttacagagcagctttgaaactctatttttgtggattttgcaaattgatatttagattgctttagcgatatcgttggaaaagggaatatcgtcatacaaaatctagacagaagcattctcacaaacttctttgtgatgtgtgtcctcaactaacagagttgaacctttcttttgatgcagcagtttggaaacactctttttgtagcaactgtaagtggatatttggatagctctaacgatttcgttggaaacgggaatatcatcatctaaaatctagacagaagcactattagaaactacttggtgatatctgcattcaagtcacagagttgaacattcccttactttgagcacgtttgaaacactcttttggaagaatctggaagtggacatttggagcgctttgatgcctttcgtgaaaaggaaacgtcttccaataaaagccagacagaagcattctcagaaacttgtttgtgatgtgtgtactcaactaaaagagttgaacctttctattgatagagcagttttgaaacactctttttgtggattctgcaagtggatatttggattgctttgaggatttcgttggaagcgggaattcgtataaaaactagacagccagcattcccagcaaatttctttcggatatttccattcgactcatagagatgaacatggcctttcatagagcaggtttgaaacactctttttgtagtttgtggaagtggacatttcgatcgccttgacgcctacggtgaaaaaggaaatatcttcccataaaaaatagacagaagcattctcagaaacttgttggtgatatgtgtcctcaactaacagagttgaactttgccattgatagagagcagttttgaaacactctttttgtggaatctgcaagtggatatttggatagcttggaggatttcgttggaagcgggaattcaaataaaaggtagacagcagcattcccagaaatttctttctgatgtctgcattcaactcatagagttgaagattccctttcatagagcaggtttgaaacactctttctgaagtatctggatgtggacatttggagcgctttgatgcctacggtgagaaagtaaatatcttcccataaaaacgagacagaaggattctgagaaacaagtttgtgatgtgtgtactcagctaacagagtggaacctctcttttgatgcagcagtttggaaacactctttttctagaaactgtaagtggatatttggatagctctaatgatttcgttggaaacgggaatatcatcatctaaaatctagacagaagccctctcagaaactactttgtgatatctgcattcaagtcacagatttgaacattcgttttcttagagcacgtttgaaacacactttttgtagtgtctggaagtggacatttgtagcgctttgatgcctttggtgaaaaagggaatgtcttcccataaaaactagacagaaagcattctcagcaaacttgtttgtgatgtgtgtacccagccaaaggagttgaacatttctattgatagagcagttttgaaacactctttttgtggaaaatgcaggtggatatttggatagcttggaggatttcgttggaagcgggaattcaaataaaaggtagacagcagcattctcagaaatttctttctgatgtctgcattcaactcatagagttgaagattccctttcatagagcaggtttgaaacagtctttctggagtatctgcatgtggacatttggagcgctttgatgcctacggtgaaaaagtaaatatcttcccataaaaacgagacagaaggattctcagaaacaagtttgtgatgtgtatactcagctaacagagtggaacctttctttttacagagcagctttgaaactctatttttgtggattctacaaattgatatttagattgctttaacgatatcgttggaaaagggaatatcgtcatacaaaatctagacagaagcattctcacaaacttctttgtgatgtgtgtcctcaactaacagagttgaacctttcttttgatgcagcaatttggaggcacccttttggtagaaactgtaactggatatttggatagctctaacgatttcgttggaaacgggaatatcatcatctaaaatgtagacagaagcactattagaaactacttggtgatatctgcattcaagtcacagagttgaacattcccttacttcgagcacgtttgaaacactcttttggaagaatctggaagtggacatttggagcgctttgatgcctttggtgaaaaggaaacgtcttccaataaaagccagacagaagcattctcagaaacttgttcgtgatgtgtgcactcaactaaaagagttgaacctttctattgatagagcagttttgaaacactctttttgtggattctgcaagtggatatttggattgctttgaggatttcgttggaagcgggaattcgtataaacactagacagcagcattcccagaaatttctttcggatatttccattcaactcatagagatgaacatggcctttcatagagcaggtttgaaacactctttttgtagtttgtggaagtggacatttcgatcgccttgacgcctacggtgaaaaaggaaatatcttcccataaaaaatagacagaagcattctcagaaacttgttggtgatatgtgtcctcaactaacagagttgaactttgccattgatagagagcagttttgaaacactctttttgtggaatctgcaagtggatatttggatagcttggaggatttcgttggaagcgggaattcaaataaaaggtagacagcagcattctcagaaatttctttctgatgtctgcattcaactcatagagttgaagattccctttcatagagcaggtttgaaacactctttctggagtatctggatgtggacatttggagcgctttgatgcctacggtgaaaaagtaaatatcttcccgtaaaaacgagacagacggattctgagaaacaagtttgtgatgtgtgtactcagctaacagagtggaacctctcttttcatgcagcagtttggaaacactctttttgtagaaactgtaagtggatatttggatagctctaatgatttcgttggaaacgggaatatcatcatctaaagtctagacagaagcactctcagaaactactttgtgatatctgcattcaagtcacagagttgaacattcgctttcttagagcacgtttgaaacactctttttgtagtgtctggaagtggacatttggagcgctttgatgcctttggtgaaaaagggaatgtcttcccataaaaactagacagaagcatgctcagaaacttgtttgtgatgtgtgtacccagccaaaggagttgaacatttctattgatagagcagttttgaaacactcttgttgtggaaaatgcaggtggatatttggatagcttggaggatttcgttggaagcgggaattcaaataaaaggtagacagcagcattctcagaaatttctttctgatgtctgcattcaactcatagagttgaagattccctttcatagagcaggtttgaaacactcgttctggagtatctggatgtggacatttggagcgctttgatgcctacggtggaaaagtaaatatcttcccataaaaacgagacagaaggattctcagaaacaagtttgtgatgtgtgtactcagctaacagagtggaacatttctttttacagagcagctttgaaactctatttttgtggattctgcaaattgatatttagattgctttaacgatatcgttggaaaagggaatatcgtcatacaaaatctagacagaagcattctcacaaacttctttgtgatgtgtgtcctcaactaacagagttgaacttttcttttgatgcagcagtttggaaacactgtttttgtagaaactgtaagtggatattttgatagctctaacgatttcgttggaaacgggaatatcatcatctaaaatctagacagaagcactattagaaactacttggtgatatctgcattcaagtcacagagttgaacattcccttactttgagcacgtttgaaacactcttttggaagaatctggaagtggacatttggagcgctttgatgcctttggtgaaaaggaaacgtcttccaataaaagccagacagaagcattctcagaaacttgtttgtgatgtgtgtactcaactaaaagagttgaacctttctattgatagagcagttttgaaacactctttttgtggattctgcaagaggatatttggattgctttgaggatttcgttggaagcgggaattcgtataaaaactagacagcagcattcccagaaatttctttcggatatttccattcgactcatagagatgaacatggcctttcatagagcaggtttgaaacactctttttgtagtttgtggaagtggacatttcgatcgccttgacgcctacggtgaaaaaggaaatatcttcccataaaaaatagacagaagcattctcagaaacttgttggcgatacgtgtcctcaactaacagagttgaactttgccattgatagagagcagttttgaaacactctttttgtggaatctgcaagtggatatttggatagcttggaggatttcgttggaagcgggaattcaaataaaaggtagacagcagcattctcagaaatttctttctgatctctgcattcaactcatagagttgaagattccctttcatagggcaggtttgaaatactctttctgtagtatctggatgtggacatttggagcgctttgatgcctacggtgaaaaagtaaatatcttcccataaaaacgagacagaaggattctgagaaacaagtttgtgatgtgtgtactcagctaacagagtggaacctctcttttgatgcagcagtttggaaacactctttttgtagaaactgtaagtggatatttggatagctctaatgatttctttggaaacgggaatatcatcatctaaaatctagacagaagctcactcagaaactactttgtgatatctgcattcaagtcacagagttgaacattcgctttcttagagcacgtttgaaacactctttttgtagtgtctggaagtggacatttggagcgctttgatgcctttggtgaaaaagggaacgtcttcccataaaaactagacagaagcattctcagaaacttgtttgtgatgtgtgtacccagctaaaggagttgaacatttctattgatagagcagttttgaaacactctttttgtggaaaatgcaagtggatatttggatagcttggaggatttcgttggaagcgggaattcaaataaaggtagacagcagcattctgagaaattagtttctgatgtctgcattcaactcatagagttgaagattccctttcatagagcaggtttgaaacactgtttctggagtatctggatgtggacatttggagcgctttgatgcctacggtgaaaaagtaaatatcttcccataagaacgagacagaaggattctgagaaacaagtttgtgatgtgtgtactcagctaacagagtggaacctttctttttacagagcagctttgaaactctatttttgtggattctgcaaatggatatttagattgctttaatgataccgctggaaaagggaatatggtcatacaaaatctagacagaagcattctcacaaacttctttgtgatgtgtgtcctcaactaacagagttgaacctttcttttgatgcagcagtttggaaacactgtttttgtagcaactgtaatggatatttggatagctctaacgatttcgttggaaacgggaatatcatcatctaaaatctagacagaagcactattagaaactacttggtgatatctgcattcaagtcacagagttgaacattcccttactttgagcacgtttcaaacactcttttggaagaatctggaagtggacatttggagcgctttgatgcctttggtgaaaaggaaacgtcttccaataaaagccagacagaagcattctcagaaacttgtttgtgatgtgtgtactcaactacaagagttgaacctttctattgatagagcagttttgaaacactcttttgtggattctgcaagtggatatttggattgctttgaggatttcgttggaagcgggaattcgtataaaactagacagccagcattcccagaaatttctttcggatatttccattcaactcattgagatgaacatcgcctttcatagagcaggtttgaaacactctttttgtagtttgtggaagtggacatttcgatcgccttgacgcctacggtgaaaaaggaaatatcttcccataaaaaatagacagagcattctcagaaacttgttggtgatatgtgtcctcaactaacagagttgaactttgccattgatagagagcagttttgaaacactctttttgtggaatctgcaagtggatatttggatagcttggaggatttcgttggaagcgggaattcaaataaaaggtagacagcagcattctcagaaatttctttctgatgtctgcattcaactcatagagttgagcattccctttcatagggcaggtttgaaatactctttctgtagtatctggatgtggacatttggagcgatttgaggcctacgatgaaaaagtaaatatcttcccataaaaacgagacagaaggattctgagaaacaagtttgtgatgtgtgtactcagctaacagagtggaacctctcttctgatgcagcagtttggaaacactctttttgtagaaactgtaagtgaatatttggatagctctaatgatttcgttggaaatgggaatatcatcaactaaaatctagacagaagccctctcagaaactactttgtgatatctgtattcaagtcacagagttgaacattcgctttcttagagcacgttggaaacactctttttgtagtgtctggaagtggacatttggagcgctttgatgcctttggtgaaaaagggaatgtcttcccataaaaactagacagaagcattctcagaaacttgtttgtgatgtgtgcacccagctaaaggagttgaacatttattgatagagcagttttgaagcactctttttgtggaaaatgcaagtggatatttggatagcttggaggatttcgttggaagcgggagttcaaataaaaggtagacagcagcattctcagaaatttctttctgatgtctgcattcaactcatagagttgaagcattccctttcataggagcaggtttgaaacactctttctggagtatctggatgtggacatttggagcgctttgatgcctacggtgaaaaagtaaatatcttcccataaaaacgagacagaaggattctgagaaacaagtttgtgatgtgtgtactcagctaacagagtggaacctttctttttacagagcagctttgaaactctatttttgtggattctgcaaatggatatttagattgctttaacgatatcgttggaaaagggaatatcgtcatacaaaatctagacagaagcattctcacaaacttctttgtgatgtgtgtcctcaactaacagagttgaacctttcttttgatgcagcaatttggaaacacccttttggtagaaactgtaattggatatttggatagctctaacgatttcgttggaaacgggaatatcatcatctaaaatctagacagaagcactattagaaactacttggtgatatctgcattcaagacacagagtagaacattcccttactttgagcacgtttgaaacactcttttggaagaatctggaagtggacatttggagcgctttgatgcctttggtgaaaaggaaacgtcttccaataaaagccagacagaagcattctcagaaacttgtttgtgatgtgtgtactcaactaaaagagttgaacctttctattgatagagcagttttgaaacactctttttgtggattctgcaagtggatatttggattgctttgaggatttcgttggaagcgggaattcgtataaacactagacagcagcattcccagaaatttctttcggatatttccattcaactcatagagatgaacatggcctttcatattgaaacacactttttgtagtttgtggaagtggacatttcgatcgccttgacgcctacggtgaaaaaggaaatatcttcccataaaaaatagacagaagaattctcagaaacttgtttgtgatgtgtatcctcaactgacagagttgaaccttgccattgatagagcagtttagaaacactctttttgtggaatctgcaagtggatatttggatagcttggaggatttcgttggaagcgggaattcaaatgaaaggtagacagcagcattctcagaaatttctttctgatgtctgcattcaactcatagcagttgaagattccctttcatagagcaggtttgaaacactctttctggagtatctggatgtggacatttggagcgctttgatgcctacggtgaaaaagtaaatatcttcccataaaaacgagacagaaggattctcagaaacaagtttgtgttgtgtgtactcagctaacagagtggaacctttctttttacagagcagctttgaaactctatttttgtggattctggaaattgatatttagattgctttaacgatatcgttggaaaagggaatatcgtcatacaaaatctggacagaagccctctcagaaactactttgtgatatctgcattcaagtcacagagttgaacattcgctttcttagagcacgttggaaacactctttttgtagtgtctggaagtggacatttggagtgctttgatgcctttggtgaaaaagggaacgtcttcccataaaaactagacagaagcattctcagaaacttgtttgtgatgtgtgcacccagctaaaggagttgaacatttattgatagagcagttttgaagcactctttttgtggaaaatgcaagtggatatttggatagcttggaggatttcgttggaagcgggaattcaaataaaaggtagacagcaggattctcagaaacaagtttgtgatgtgtgtactcagctaacagagtggaacctttctttttacagagcagctttgaaactctatttttgtggattctgcaaattgatatttagattgctttaacgatatcattggaaaagggaatatcgtcatacaaaatctagacagaagccctctcacaaactactttgtgatatctgcattcaagtcacagagttgaacattcgctttcttagagcacgttggaaacactctttttgtagtgtctggaagtggacatttggagcgctttgatgcctttggtgaaaaagggaacgtcttcccataaaaactagacagaagcattctcagaaacttgtttgtgatgtgtgtacctagctaaaggagttgaacatttctattgatagagcagttttgaaacactctttttgtggaaaatgcaggtggatatttggataggttggaagatttcgttggaagcgggaattcaaataaatggtagacagcaggattctgagaaacaagtttgtgatatgtgtactcagctaacagagtggaacctttctttttacagagcagctttgaaactctatttttgtggattctgcaaattgatatttagattgctttaacgatatcgttggaaaagggaatatcgtcatacaaaatctagacagaagcattctcacaaacttctttgtgacgtgtgtcctcatctaacagagttgaacctttcttttgatgcagcagtttggaaacactgtttttgtagcaactgtaagtggatatttggatagctctaacgatttcgttggaaacgggaatatcatcatctaaaatctagacagaagcactattagaaactacttggtgatatctgcattcaagtcacagagttgaacattcccttactttgagcacgtttcaaacactcttttggaagaatctggaagtggacatttggagcgctttgatgcctttggtgaaaaggaaacgtcttccaataaaagccagacagaagcattctcagaaacttgtttgtgatgtgtgtactcaactaaaagagttgaacctttctattgatagagcagttttgaaacactctttttgtcgattctgcaagtggatatttggattgctttgaggatttcgttggaagcggcaattcgtataaaaactagacagcagcattcccagaaatttctttcggatatttccattcaactcatagagatgaacatcgcctttcatagagcaggtttgaaacactctttttgtagtttgtggaagtggacatttcgatcgccttgacgcctacggtgaaaaaggaaatatcttcccataaaaaatagacagaagcattctcagaaacttgttggtgatatgtgtcctcaactaacagagttgaactttgccattgatagagagcagttttgaaacactctttttgtggaatctgcaagtggatatttggatagcttggaggatttcgttggaagcgggaattcaaataaaaggtagacagcaagcattctcagaaatttcttcctgatgtctgcattcaactcatagagttgaacattccctttcatagagcaggtttgaaacactctttctggagtatctggatgtggacatttggagcgctttgatgcctacggtgaaaaagtaaatatcttcccataaaaacgagacagaaggattctgagaaacaagtttgtgatgtgtgtactcagctaacagagtggaacctctctcttgatgcagcagtttggaaacactctttttgtagaaactgtaagtggatatttggatagctctaatgatttcgttggaaacgggaatatcatcatctaaaatctagacagaagccctctcagcaaactactttgtgatatctgcattcaagtcagagagttgaacattcgctttcttagagcacgtttgaaacactctttttgtagtgtcaggaagtggacatttggagcgctttgatgcctttggtgaaacagggaatgtcttcccataaaaactagacagaagcattctcagaaacttgtttgtgatgtgtgtacccagctaaaggagttgaacgtttctattgatagagcagttttgaaacactctttttgtggaaaatgcaagtggatatttggatagcttggaggatttcgttggaagcgggaattcaaataaaaggtagacagcaggattctgagaaacaagtttgtgatgtgtgtactcagctaacagagtggaacctctctttttacagagcagctttgaaactctatttttgtggattctgcaaatggatatttagattgctttaatgatatcgctggaaaagggaatatggtcatacaaaatctagacagaagcattctcacaaacttctttgtgatgtgtgtcctcaactaacagagttgaacctttcttttgatgcagcagtttggaaacactctttttgtagaaactgtaagtggatatttggatagctctaacgatttcgctggaaacgggaatatcgtcatctaaaatctagacagaagcactattagaaactacttggtgatatctgcattcaagtcacagagtagaacattcccttactttgagcacgtttgaaacactcttttggaagaatctggaagtggacatttggagcgctttgatgcctttggtgaaaaggaaacgtcttccaataaaagccagacagaagcattctcagaaacttgtttgtgatgtgtgtacccagcgaaaggagttgaacatttctattgatagagcagttttgaaacactctttttgtggaatctgcaagtggatatttggatagcttggaggttttcgttggaagcgggaattcaaataaaaggtagacagcattctcagaaacttgtttgtgatgtgtgtcctcaactgacagagttgtacctttctattgatagagtagttttgaaacactctttttgtggaatctgcaagtgaatatttggatagcttggaggatttcgttggaagcgggaattcaaatgaaaggtagacagcagcattctcagaaatttctttctgatgtctgcattcaactcataggagttgaagattccctttcatagagcaggtttgaaacactctttctggagtatctggatgtggacatttggagcgctttgatgcctacggtgaaaaagtaaatatcttcccagaaaaacgagacagaaggattctgagaaacaagtttgtgatgtgtgtactcacctaacagagtggaacctctcttttgatgcagtagtttggaaacactctttttgtagaaactgtaagtggatatttggatagctctaatgatttcgttggaaacgggaatatcatcatctaaaatctagacagaagcactctcagaaactactttttgatatctgcattcaagtcatagtgttgaacattcgctttcttagagcacttttgaaacactctttttgtagtatctggaagtggacatttggagctctttgatgcctttggtgaaaaaggaaatgtcttcccataaaatctagaaagaagcattctcagaaacttgtttgtgatgtgtgtacccagccaaaggagttgaacatttctattgatagagcagttttgaaacactcttgttgtggaaaatgcaggtggatatttggatagcttggaggatttcgttggaagcgggaattcaaataaaaaggtagacagcagcattctcagaaatttctttctgatgtctgcattcaactcatagagttgaagattccctttcatagggcaggtttgaaacagtctttctggagtatctggatgtggacatttggagcgctttgatgcctacggtgaaaaagtaaatatcttcccataaaaacgagacagaaggattctcagaaacaagtttgtgatgtgtgtactcagctaacagagtggaacctttctttttacagagcagctttgaaactctatttctgtggattctgcaaattgatatttagattgctttaatgatatcgttggaaaagggaatatcgtcatacaaaatctagacagaagcattctcacaaacttctttgtgatgtgtgtcctcaactaacagagttgaacttttcttttgatgcagcagtttggaaacactctttttgtagaaagtgtaagtggatatttggatagctctaacgatttcgttggaaacgggaatatcatcatctaaaatctagacagaagcactattagaaactacttggtgatatctgcattcaagtcacagagttgaacattcccttactttgagcacgtttgaaacactcttttggaagaatctggaagtggacatttggagcgctttgatgcctttggtgaaaaggaaacgtcttccaataaaagccagacagaagcattctcagaaacttgtttgtgatgtgtgtactcaactaaaagagttgaacctttctattgatagagcagttttgaaacactctttttgtggattctgcaagtggatatttggattgctttgaggatttcgttggaagcgggaattcatataaaaactagacagcagcattcccagaaatttctttcggatatttccattcaactcatagagatgaacatcgcctttcatagagcaggtttgaaacactctttttgtagtttgtggaagtggacatttcgatcgccttgacgcctacagtgaaaaaggaaatatcttcccataaaaaatagacagaagcattctcagaaacttgttggtgatatgtgtcctcaactaacagagttgaactttgccattgatagagagcagttttgaaacactctttttgtggaatctgcaagtggatatttggatagcttggaggatttcgttggaagcgggaattcaaataaaaggtagacagcagcattctcagaaatttctttctgatgtctgcattcaactcatagagttgaagattccctttcatagagcaggtttgaaacactctttctggagtatctagatgtggacatttggagcgctttgatgcctacggtgaaaaagtaaatatcttcccataaaaacgagacagaaggattctgagaaacaagtttgtgatgtgtgtactcagctaacagagtggaacctctctttggatgcagcagtttggaaacactctttttgtagaaactgtaagtggatatttggatagctctaatgatttcgttggaaacgggaatatcatcatctaaaatctagacagaagccgtctcagaaagtactttgtgatatctgcattcaagtcacagagttgaacattcggtttcttagagcacgtttgaaacactctttttgtagtgtctggaagtggacatttggagcgctttgatgcctttggtgaaaaagggaatgtcttcccataaaaactagacagaagcattctcagaaacttgtttgtgatgtgtgtacccagctaaaggagttgaacatttctattgatagagcagttttgaaacactctttttgtggaaaatgcaagtggatatttggatagcttggaggctttcgttggaagcgggatttcaaataaaaggtagacaacagcatttctcagaaatttctttctgatgtctgcattcaactcatagagttgaagattccctttcatagagcaggtttgaaacactctttctggagtatctggatgtggacatttggagcgctttgatgcctacggtggaaaagtaaatatcttcccataaaaacgagacagaaggattctgagaaacaagtttgtgatgtgtgtactcagctaacagagtggaacctttctttttacagagcagctttgaaactctatttttgtggattctgcaaatggatatttagattgctttaatgatatcgttggaaaagggaatatcgtcatacaaaatctagacagaagcattctcacaaacttctttgtgatgtgtgtcctcaactaacagagttgaacctttcttttgatgcagcagtttggaaacactctttttgtagaaactgtaagtggatatttggatagctctaacgatttcgttggaaacgggaatatcatcatctaaaatctagatagaagcactattagaaactacttggtgatatctgtattcaagtcacagagttgaacattcccttactttgagcacgtttgaaacactcttttggaagaatctggaagtggacatttggagcgctttgatgcctttggtgaaaaggaaacgtcttccaataaaagccagagagaagcattctcagaaacttgttcgtgatgtgtgtactcaactaaaagagttgaacctttctattgatagagcagttttgaaacactctttttgtggattctgcaagtggatatttggattgctttgaggatttcgttggaagcgggaattcatataaaaactagacagcagcattcccagaaatttttttcggatatttccattcaactcatagagatgaacatggcctttcatagagcaggtttgaaacactctttttgtagtttgtggaagtggacatttcgatcgccttgacgcctacggtgaaaaaggaaatatcttcccataaaaaatagacagaagcattctcagaaacttgttggtgatatgtgtcctcaactaacagagttgaactttgccattgatagagagcagttttgaaacactctttctgtggaatctgcaagtggatatttggatagcttggaggatttcgttggaagcgggaattcaaataaaaggtagacagcagcattctcagaaatttctttctgatgtctgcattcaactcatagagttgaagattccctttcatagagcaggtttgaaaaactctttctgtactatctggatgtggacatttggagcgctttgatgcctacggtgaaaaagtaaatatcttcccataaaaacgagacagaaggattctgagaaacaagtttgtgatgtgtgtactcagctaacagagtggaacctctcttttgatgcagcagtttggaaacactctttttgtagaaactgtaagtggatatttggatagctctaatgatttcgttggaaacgggaatatcatcgtctaaaatctagacagaagccctctcagaaactactttgtgatatctgcattcaagtcacagagttgaacattcggtttcttagagcacgtttgaaacactctttttgtagtgtctggaagtggacatttggagcgctttgatgcctttggtgaaaaagggaacgtcttcccataaaaactagacagaagcattctcagaaacttgtttgtgatgtgtgtacccagctaaaggagttgaatatttctattgacagagcagttatgaaacactttttttgtggaaaatgcaagtggatatttggatagcttggaggatttcgttggaagcgggaattcaaataaaaggtagacagcagcattctcagaaatttctttctgatgtctgcattcaactcatagagttgaagattccctttcatagagcaggtttgaaacactcgttctggagtatctggatgtggacctttggagcgctttgatgcctacggtggaaaagtaaatatcttcccataaaaacgagacagaagggattctcagaaacaagtttgtgatgtgtgtactcagctaacagagtggaacctttctttttacagagcagctttgaaactctatttttgtggattctgcaaattgatatttagattgctttaacgatatcgttggaaaagggaatatcgtcatacaaaatctagacagaagcattctcacaaacttctttgtgatgtgtgtcctcaactaacagagttgaacctttcttttgatgcagcaatttggaaacacccttttggtagaaactgtaactggatatttggatagctctaacgatttccttggaaacgggaatatcatcatctaaaatctagacagaagcactattagaaactacttggtgatatctgcattcaagtcacagagttgaacattcccttactttgagcacgtttcaaacactcttttggaagaatctggaagtggacatttggagcgctttgatgcctttggtgaaaaggaaacgtcttccaataaaagccagacagaagcattctcagaaacttgtttgtgatgtgtgtactcaactaaaagagttgaacctttctattgatagagcagttttgaaacactctttttgtggattctgcaagtggatatttggattgctttgaggatttcgttggaagcgggaattcgtataaaactagacagcagcattcccagaaaatttctttcggatatttccattcgactcatagagatgaacatggcctttcatagagcaggtttgaaacactctttttgtagtttgtggaagtggacatttcgatcgccttgacgcctacggtgaagaaggaaatatcttcccataaaaaatagacagaagcattctcagaaacttgtttgtgatgtgtgtacccagccaaaggagttgaacatttctattgatagagcagttttgaaacactcttgttgtggaaaacgcaggtggatatttggatagcttggaggatttcgttggaagcgggaattcaaataaaaggtagacagcagcattctcagaaatttctttgtgatgtttgccttcaactcatagagttgaacattccctttcatagagcaggtttgaaacactctttctgtactatctggatgtggacattgggatcgctttgatgcctatggtgaaaaaggaaatatcttcccataaaagctagacagaaggattctgagaaacaagtttgtgatgtgtgtactcagctaacagagtggaacctctcttttgatgcagcagtttggaaacactctttttgtagaaactgtaagtggatatttggaagctctaatgattttgttggaaacgggaatatcatcatctaaaatctagacagaagccctctcagaaactactttgtgatatctgcattcaagtcacagagttgaacattcggtttcttagagcacgtttgaaacactctttttgtagtgtctggaagtggacatttggagcgctttggtgcctttggtgaaaaagggaatgtcttcccataaaaactagacagaagcattctcagaaacttgtttgtgatgtgtgtacccagctaaaggagttgaacgtttctattgatagagcagttttgaaacactctttttgtggaaaatgcaagtggatgtttggatagctaggaggatttcgttggaagcgggaattcaaataaaaggtagacagcaggatgctgagaaacaagtttgtgatgtgtgtactcagctaacagagtggaacctttctttttacagagcagctttgaaactctatttttgtggattctgcaaatggatatttagattgctttaatgatatcgctggaaaagggaatatggtcatacaaaatctagacagaagcattctcacaaacttctttgtgatgtgtgtcctcaactaacagaggttgaacctttcttttgatgcagcaatttggaaacacccttttggtagaaactgtaactggatatttggatagctctaacgatttcgttggaaacgggaatatcatcatctaaaatctagacagaagcactattagaaactacttggtgatatctgcattcaagtcacagagttgaacattcccttactttgagcacgtttcaaacactcttttggaagaatctggaagtggacatttggagcgctttgatgcctttggtgaaaaggaaacgtcttccaataaaagccagacagaaaacattctcagaaacttgtttgtgatgtgtgtactcaactaaaagagttgaacctttctattgatagagcagttttgaaacactctttttgtggattctgcaagtggatatttggattgctttgaggatttcgttggaagcgggaattcatataaaaactagacagcagcattcccagaaatttctttcggatatttccattcaactcatagagatgaacatcgcctttcatagagcaggtttgaaacactctttttgtagtttgtggaagtggacatttcgatcgccttgacgcctacggtgaaaaaggaaatatcttcccataaaaaatagacagaagcattctcagaaacttgttggtgatatgtgtcctcaactaacagagttgaactttgccattgatagagagcagttttgaaacactctttttgtggaatctgcaagtggatatttggatagcttggaggatttcgttggaagcgggaattcaaataaaaggtagacagcagcattctcagaaatttctttctgatgtctgcattcaactcatagagttgaacattccctttcatagagcaggtttgaaacactctttctggagtatctggatgtgggcatttggagcgctttgatgcctacggtgaaaaagtaaatatcttcccataaaaacgagacagaaggattctgagaaacaagtttgtgatgtgtgtactcagctaacagagtggaacctctcttttgatgcagcagtttggaaacactctttttgtagaaactgtaagtggatatttggatagctctaatgatttcgttggaaacgggaatatcatcatctaaaatctagacagaagccctctcagaaactactttgtgatatctgcattcaagtcacagagttgaacattcgctttcttagagcacgtttgcaacactctttttgtagtgtctggaagtggacatttggagcgctttgatgcctttggtgaaaaagggaacgtcttcccataaaaactagacagaagcattctcagaaacttgtttgtgatgtgtgtacccagctaaaggagttgaacatttctattgatagagcagttttgaaacactctttttgtggaaaatgcaggtggatatttggatagcttggaggatttcgttggaagcgggatttcaaataaaaggtagacaacagcattctcagaaatttctttctgatgtctgcattcaactcatagagttgaagattccctttcatagagcaggtttgaaacactctttctggagtatctggatgtggacatttggagcgctttgatgcctatggtgaaaaagtaaatatcttcccataaaaacgagacagaaaggattctgaggaaacaagtttgtgatgtgtgtactcagctaacagagtggaacctttctttttacagagcagctttgaaactctatttttgtggattctgcaaattgatatttagattgctttaacgatatcgttggaaaagggaatatcgtcatacaaaatctagacagaagcattctcacaaacttctttgtgatgtgtgtcctcaactaacagagttgaacctttcttttgatgcagcaatttggaaacacccttttggtagaaactgtaactggatatttggatagctctaacgatttcgttggaaacgggaatatcatcatctaaaatgtagacagaagcactattagaaactacttggtgatatctgcattcaagtcaaagagttgaacattcccttactttgagcacgtttgaaacactcttttggaagaatctggaagtggacatttggagcgctttgatgcctttggtgaaaaggaaacgtcttccaataaaagccagacagaagcattctgagaaacttgttcgtgatgtgtgtactcaactaaaagagttgaacctttctattgatagagcagttttgaaacactctttttgtggattctgcaagtggatatttggattgctttgaggatttcgttggaagcgggaattcgtacaaacactagacaacagcattcccagaaatttctttcggatatttccattcaactcatagagatgaacatggcctttcatagagcaggtttgaaacactctttttgtagtttgtggaagtggacatttcgatcgccttgacgcctacggtgaaaaaggaaatatcttcccataaaaaatagacagaagcattctcagaaacttgttggtgatatgtgtcctcaactaacagagttgaactttgccattgatagagagcagttttgaaacactctttttcctgaatctgcaagtggatatttggatagtttggaggatttcgttggaagcgggaattcaaataaaaggtagacagcagcattctcagaaatttctttctgatgtctgcattcaactcatagagttgaagattccctttcatagagcaggtttgaaacactctttctggagtatctggatgtggacatttggagcgctttgatgcctacggtggaaaagtaaatatcttcccataaaaacgagacagaaggattctgagaaacaagtttgtgatgtgtgtactcagctaacagagtggaacctctcttttgatgcagcagtttggaaacactctttttgtagaaactgtaagtggatatttggatagctctaatgatttcgttggaaacgggaatatcatcatctaaaatctagccagaagcactctcagaaactactttttgatatctgcattcaagtcacagacttgaacattcgctttcttagagcacttttgaaacactctttttgtagtatctggaagtggacatttggagctctttgatgcctttggtgaaaaaggaaatgtcttcccataaaaactagacagaagctttctcagaaacttgtttgtgatgtgtgtacccagcgaaaggagttgaacatttctattgatagagcagttttgaaacactctttttgtggaatctgcaagtggatatttggatagcttgtaggttttcgttggaagcgggaattcaaataaaaggtagacagcaggattctgagaaataagtttgtgatgtgtgtactcagctaacagagtggaacctctcttttgatgcagcagtttggaaacactctttttgtagaaactgtaagtggatatttggatagctctaatgatttcgttggaaacgggaatatcatcatctaaaatctagacagaagcattctcacaaacttctttgtgatgtgtgtcctcaactaacagagttgaacctttcttttgatgcagcaatttggaaacacccttttggtagaaactgtaactggatatttggatagctctaacgatttcgttggaaaagggaatatcatcatctaaaatgtagacagaagcactattagaaactacttggtgatatctgcattcaagtcacagagttgaacattcccttactttgagcacgtttcaaacactcttttggaagaatctggaagtggacatttggagcgctttgatgcctttggtgaaaaggaaacgtcttccaataaaagccagacagaagcattctcagaaacttgtttgtgatgtgtgtactcaactaaaagagttgaacctttctattgacagagcagttttgaaacactctttttgtggattctgcaagtggatatttggattgctttgaggatttcgttggaagcgggaattcgtataaaaactagacagcagcattcccagaaatttctttcggatatttccattcacctcatagagatgaacatggcctttcagagagcaggtttgaaacactctttttgtagtttgtggaagtggacatttcgatcgccttgacgcctacggtgaaaaaggaaatatcttcccataaaaaatagacagaagcattctcagaaacttgttggtgatatgtgtcctcaactaacagagttgaactttgccattgatagagagcagttttgaaacactctttttgtggaatctgcaagtggatatttggatagcttggaggatttcgttggaagcgggaattcaaataaaaggtagacagcagcattctcagaaatttctttctgatgtctgcattcaactcatagagttgaagattccctttcatagagcaggtttgaaacactctttctggagtatctggatgtggacatttggagcgctttgatgcctacggtgaaaaagtaaatatcttcccataagaacgagacagaaggattctgagaaacaagtttgtgatgtgtgtactcagctaacagagtggaacctctcttttgatgcagcagtttggaaacactctttttgtagaaactgtaagtggatatttggatagctctaatgatttcgttggaaacgggaatatcatcatctaaaatctagacagaagcactctcagaaactactttttgatatctgcattcaagtcacagagttgaacattcgctttcttagagcacttttgaaacactctttttgtagtatctggaagtggacatttggagctccttgatgcctttggtgaaaaaggaaatgtcttccaataaaaactagacagaaagcattctcagaaacttgtttgtgatgtgtgtacccagccaaaggagttgaacatttctattgatagagcagttttgaaacactctttttgtggaaaatgcaggtggatatttggatagcttggaggatttcgttggaagcgggaattcaaataaaaggtagacagcaggattctcagaaacaagtttgtgatgtgtgtactcagctaacagagtggaacctttctttttacagagcagctttgaaactctatttttgtggattttgcaaattgatatttagattgctttaacgatatcgttggaaaagggaatattgtcatacaaaatctggacagaagcattctcacaaacttctttgtgatgtgtgtcctcaactaacagagttgaacctttcttttgatgcaacagtttggaaacacccttttggtagaaactgtaagtggatatttggatagctctaacgatttcgttggaaacgggaatatcatcatctaaaatctagacagaagcactattagaaactacttggtgatatctgcattcaagtcacagatttgaacattcccttactttgagcacgtttgaaacactcttttggaagaatctggaagtggacatttggagcgctttgatgcctttggtgaaaaggaaacgtcttccaataaaagccagacagaagcattctcagaaacttgttcgtgatgtgtgtactcaactaaaagtgttgaacctttctattgatagtgcagttttgaaacactctttttgtggattctgcaagtggatatttggattgctttgaggatttcgttggaagcgggaattcgtataaaaactagacagcagcattcccagaaatttctttcggatatttccattcaactcatagagatgaacatggcctttcatagagcaggtttgaaacactctttttgtagtttgtggaagtggacatttcgatcgccttgacgcctacggtgaaaaaggaaatatcttcccataaaaaatagacagaagcattctcagaaacttgttggtgatatgtgtcctcaactaacagagttgaactttgccattgatagagagcagttttgaaacactctttttgtggaatctgcaagtggatatttggatagcttggaggatttcgttggaagcgggaattcaaataaaaggtagacagcagcattctcagaaatttctttctgatgtctgcattcaactcatagagttgaacattccctttcataggacaggtttgaaatactctttctgtagtatctggatgtggacatgtggagcgctttgatgcctacagtgaaaaagtaaatatcttcccccataaaaacgagacagaaggattctgagaaacaagtttgtgatgtgtgtactcagctaacagagtggaacctctgttttgatgcagcagtttggaaacactctttttgtagaaactgtaagtggatatttggatagctctaatgatttcgttggaaacgggaatatcatcatctaaaatctagacagaagccctctcagaaactactttgtgatatctgcattcaagtcacagagttgaacattcgctttcttagagcacgtttgaaacactctttttgtagtgtctggaagtggacatttggagcgctttgattccttttgtgaaaaagggaatgtctacccataaaaactagacagaagcattctcagaaacttgtttgtgatgtgtgtacccagctaaaggagttgaacatgtctattgatagagcagttttgaaacactctttttgtggaaaatgcaagtggatatttgcatagcttggaggatttcgttggaagcgggagttcaaataaaaggtagacagcaggattctgagaaacaagtttgtgatgtgtgtactcagctaacagagtggaacctttctttttacagagcagctttgaaactctatttttgtggattctgcaaatggatatttagattgctttaatgatatcgctggaaaagggaataggtcatacaaaatatagacagaagcattctcacaaacttctttgtgatgtgtgtcctcaactaacagagttgaacctttcttttgatgcagcagtttggaaacactcttttggtagaaactgtaactggatatttggatagatctaacgatttcgttggaaacgggaatatcatcatctaaaatctagacagaagcactattagaaactacttggtgatatctgcattcaagtcacagagttgaacattcccttactttgagcacgtttgaaacactcttttggaagaatctggaagtggacatttggagcgctttgatgcctttggtgaaaaggaaacgtcttccaataaaagccagacagaagcattctcagaaacttgttcgtgatgtgtgtactcaactaaaagagttgaacctttctattgatagagcagttttgaaacactctttttgtggattctgcaagtggatacttggattgctttgaggatttcgttggaagcgggaattcgtataaacactagacagcagcattcccagtaaatttctttcggatatttccattcaactcatagagatgaacatcgcctttcatagagcaggtttgaaacactctttttgtagtttgtggaagtggacatttcgatcgccttgacgcctacggtgaaaaaggaaatatcttcccataaacaatagacagaagcattctcagaaacttgttggtgatatgtgtcctcaactaacagagttgaaccttgccattgatagagagcagttttgaaacactctttttgtggaatctgcaagtggatatttggatagcttggaggatttcgttgcaagcgggaattcaaataaaaggtagacagcagcattctcagaaatttctttctgatgtctgcattcaactcatagagttgaagattccctttcatagagcaggtttgaaacactctttctggagtatctggatgtggacatttggagcgctttgatgcctacggtgaaaaagtaaatatcttcccagaaaaacgagacagaaggattctcagaaacaagtttgtgatgtgtgtactcagctaacagagtggaacctctcttttgatgcagcagtttggaaacactctttttgtagaaaccgtaagtggatatttggatagctctaatgatttcgttggaaacgggaatatcatcatctaaaacctagacagaaagccctctcagaaactactttgtgatatctgcattcaagtcacagagttgaacattcgctttcttagagcacgttggaaacactctttttgtagtgtctggaagtggacatttggagcgctttgattcctttggtgaaaaagggaatgtctacccataaaaactagacagagcattctcagaaacttgtttgtgatgtgtgtacccagccaaaggagttgaacatttctattgatagagcaggtttgaaacactctttttgtggaaaatgcaggtggatatttggatagcttggaggatttcgttggaagcgggaattcaaataaaaggtagacagcagcattctaagaaatttctttctgatgtctgcattcaactcatagagttgaagattccctttcatagagcaggtttgaaacactctttctggagtatctggatgtggacatttggagcgctttgatgcctacggtgaaaaagtaaatatcttcccataaaaacgagacagaaggattctcagaaagaagtttgtgatgtgtgtactcagctaacagagtggaacctttctttttacagagcagctttgaaactctatttttgtggattctgcaaattgatatttagattgctttaacgatatcgttggaaaagggaatatcgtcatacaaaatctagacagaagcattctcacaaacttctttgtgatgtgtctcctcaactaacagagttgaacctttcttttgatgcagcagtttggaaacactctttttgtagaaactgtaagtggatatttggatagctctaacgatttcgttggaaacgggaatatcatcatctaaaatctagacagaagcactattagaaactacttggtgatatctgcattcaagtcacagagttgaacattcccttactttgagcacgtttgaaacactcttttggaagaatctggaagtggacatttggagcgctttgatgcctttggtgaaaaggaaacgtcttccaataaaagacagacagaagcattctcagaaacttgttcgtgatgtgtgtactcaactaaaagagttgaacctttctattgatagagcagttttgaaacactctttttgtggattctgcaagtggatatttggattgctttgaggatttcgttggaagcgggaattcgtataaacactagacagcagcattcccagaaatttctttcggatatttccattcaactcatagagatgaacatggcctttcatagagcaggtttgaaacactctttttgtagtttgtagaagtggacatttcgatcgccttgacgcctaccgtgaaaaaggaaatatcttcccataaaaaatagacagaagcattctcagaaacttgttggtgatatgtgtcctcaactaacagagttgaactttgccattgatagagagcagttttgaaacactctttttgtggaatctgcaagtggatatttggatagcttggaggatttcgttggaagcgggaattcaaataaaaggtagacagcagcattctcagaaatttctttctgatgtctgcattcaactcatagagttgaagattccctttcatagagcaggtttgaaacactctttctggagtatctggatgtggacatttgaagcgctttgatgcctacggtgaaaaagtaaatatcttcccataaaaacgagacagaaggattctgagaaacaagtttgtgatgtgtgtactcgggctaacagagtggaacctctcttttgatgcagcagtttggaaacactctttttgtagaaactgtaagtggatatttggatagctctaatgatttcgttggaaacgggaatatcatcatctaaaatctagacagaagcattctcagaaatttctttctgatgtttgcattcaactcatagagttgaacattccctttaatagagcaggtttgaaacactctttctgtactatccggatgtggacatttggagcgctttgacgcctacggtgaaaaaggaaatgtcttcccataaaaaattgaagaattctcagaaacttgtttgtgatgtgtgtcctcaactgacagagttgtacctttctattgatagagtagttttgaaacactctttttgtggaatctgcaagtgaatatttggatagcttggaggatttcgtcggaagcgggaattcaaatgaaaggtagacagcagcattctcagaaattactttctgttgtctgcattcaactcatagagttgaagattccctttcatagagcaggtttgaaacactctttctgtagtatctggatgtggacatttggagcgctttgatacctacggtgaaaaagtaaatatcttcccataaaaactagacagaaggattctcagaaacaagtttgtgatgtgtgtactcagctaacagagtggatcctttctttttacagagcagctttgaaactctatttctgtggattctgcaaattgacatttgggttgatttaacgacatcgttggaaaagggaatatcttcatacaaaatctagacagaagctttctcagaaacttctttgtgatgtgtgtcctcaactaacagacttgaacctttcttttgatgcagcagtttggaaacactctttttgtagaaactgtaagtggatatttggataggtctaacgatatcgttggaaacgggaatatcttcatctaaagtatacacagaagcactattagaaactacttggtgatatctgcattcaagtcacagagttgaacattcccttactttgagcacgtttcaaacactcttttggaagaatctggaagtggacatttggagcgctttgatgcctttggtgaaaaggaaacgtcttccaataaaagccagacagaagcattctcagaaacttgttcgtgatgtgtgtactcaactaaaagggttgaacctttctattgatagagcagttttgaaacactctttttgtggattctgcaagtggatatttggattgctttgaggatttcgttggaagcgggaattcgtataaaaactagacagcagcattcccagaaatttctttcggatatttccattcaactcatagagatgaacatggcctttcatagagcaggtttgaaacactctttttgtagtttgtggaagtggacatttcgatcgccttgacgcctacggtgaaaaaggaaatatcttcccataaaaaatagacagaagaattctcagaaacttgtttgtgatgtgtatcctcaactgacagagttgaaccttgccattgatagagcagtttagaaaccctctttttgtggaatctgcaagtggatatttggatagcctggaggatttcgttggaagcgggaattcaaatgaaaggtagacagcagcattctcagaaatttctttgtgatgtttgcattcaactcatagagttgaacattccctttcatagagcaggtttgaaacactctttctgtactatctggatgtggacatttggaacgctttgatgcctacggtgaaaaattaaatatcttcccataaaagctagacagaaggattctcagaaacaagtttgtgatgtgtgtactcagctaacagagtggaacctcacttttgatgcagcagtttggaaacactctttttgtagaaactgtaagtggatatttggatagctctaatgatttcgttggaaacgggaatatcatcatctaaaatcgagacagaagccctctcagaaactactttgtgatatctgcattcaagtcacagagttgaacattcgctttcttagagcacgtttgaaacactctttttgtagtgtctggaagtggacatttggagcgctttgattcctttggtgaaaaagggaatgtctacccataaaaactagacagaagcattctcagaaacttgtttgtgatgtgtgtacccagccaaaggagttgaacatttctattgatagagcagttttgaaacgctctttttgtggaaaatgcaggtggatatttggatagcttggaggatttcgttggaagcgggaattcaaataaaatttagacagcaagattctcagaaacaagtttgtgatgtgtgaactcagctaacagagtggatcctttctttttacagagcagctttgaaactctatttctgtggattctgcaaattgatatttgggttgatttaacgacatcgttggaaaagggaatatcttcatacaaaatctagacagaagcattctcacaaacttctttgtgatgtgtgtcctcaactaacagagttgaacctttcttttgatgcagcagtttggaaacactctttttgtagaaactgtaagtggatatttggatagctctaacgatttcgttggaaacgggaatatcttcatctaaaaagcactattagaaactacttggtgatatctgcattcaagtcacagagttgaacattcccttactttgagcacgtttcaaacactcttttggaagaatctggaagtggacatttggagcgctttgatgatgactttggtgaaaaggaaacgtcttccaataatagccagacagaagcattctcagaaacttgtttgtgatgtgtgtactcaactaaaagagttgaacctttctattgatagagcggttttgaaacactctttttgtggattctgcaagtggatatttggattgctttgaggatttcgttggaagcgggaattcgtataaacactagacagcagcattcccagaaatttctttcggatatttccattcaactcatagagatgaacatggcctttcatagagcaggtttgaaacactctttttgtagtttgtggaagtggacatttcgatcgccttgacgcctacggtgaaaaaggaaatatcttcccataaaaaatagacagaagcattctcagaaacttgttggtgatatgtgtcctcaactaacagagttgaactttgccattgatagagagcagttttgaaacactctttttgtggaatctgcaagtggatatttggatagcttggaggatttcgttggaagcgggaattcaaataaaaggtagacagccagcattctcagaaatttctttctgatgtctgcattcaactcataggagttgaagattccctttcatagagcaggtttgaaacactcgttctggagtatctggatgtggacatttggagcgctttgatgcctacggtggaaaagtaaatatcttcccataaaaacgagacagaggattctgagaaacaagtttgtgatgtgtgtactcagctaacagagtggaacctctcttttgatgcagtagtttggaaacaccctttttgtagaaactgtaaggggatatttggatagctctaatgatttcgttggaaacgggaatatcatcatctaaaatctagagagaagcactctcagaaactactttttcatatctgcattcaagtcacagagttgaacattcgctttcttagagcacttttgaaacactctttttgtagtatctggaagtggacatttggagctctttgatgcctttggtgaaaaaagaaatgtcttcccataaaaactagacagaagcattctcagaaacttgtttgtgatgtgtgtacccagccaaaggagttgaacatttctattgatagagcagttttgaaacgctctttttgtggaaaatgcaggtggatatttggatagcttggaggatttcgttggaagcaggaattcaaataaaaggtagacagcaggattctgagaaacaaggtttgtgatgtgtgtactcagctaacagagtggaacctttctttttacagagcagctttgaaactctatttttgtggattctgcaaatggatatttagattgctttaacgatatcgttggaaaagggaatatcgtcatacaaaatctagacagaagctttctcagaaacttctttgtgttgtgtgtcctcaactcacagagttgaacctttcttttgatgcagcagtttggaaacacactttttgtagaaactgtaagtggatatttggataggtctaacgatatcgttggaaacgggaatatcttcatctaaagtatacacagaaagcactattagaaactacttggtgatatctgcattcaagtcacagagttgaacattcccttacttcgaccacgtttgaaacactcttttggaagaatctggaagtggacatttggagcgctttgatgcctttggtgaaaaggaaacgtcttccaataaaagccagacagagcattctcagaaacttgtttgtgatgtgtgtactcaactaaaagagttgaacctttctattgatagcgcagttttgaaacactctttttgtggattctgcaagtggatatttggattgctttgaggatttcgttggaagcgggaattcgtataaaaactagacagcagcattcccagaaatttctttcggatatttccattcaactcatagagatgaacatcgccttttatagagcaggtttgaaacactctttttgtagtttgtggaagtggacatttcgatcgccttgacgcctacggtgaaaaaggaaatatcttcccataaaaaatagacagaagcattctcagaaacttgttggtgatatgtgtcctcaactaacagagttgaaatttgccattgatagagagcagttttgaaacactctttttgtggaatctgcaagtggatatttggatagcttggaggatttcgttggaagcgggaattcaaataaaaggtagacagcagcattctcagaaatttctttctgatgtctgcattcaactcatagagttgaagattccctttcatagagcaggtttgaaacactctttctggagtatctggatgtggacatttggagcgctttgatgcctacggtggaaaagtaaatatcttcccataaaaacgagacagaaggattctgagaaacaagtttgtgatgtgtgtactcagctaacagagtggaacctctcttttgatgcagcagtttggaaacactctttttgtagaaactgtaagtggatatttggatagctctaatgatttcgttggaaacgggaatatcatcatctaaaatctagacagaagccctctcagaaactactttgtgatatctgcattcaagccacagagttgaacattcgctttcttagagcacgtttgaaacactctttttgtagtgtctggaagtggacatttggagcgctttgatgcctttggtgaaaaagggaatgtcttcccataaaaactagacagaagcattctcagaaacttgtttgtgatgtgtgtacccagccaaaggagttgaacatttctattgatagagcagttttgaaacactctctttgtggaaaatgcaggtggatatttggatagcttggaggatttcgttggaagcgggaattcaaataaaaggtagacagcagcattctcagaaatttctttctgatgtctgcattcaactcatagagttgaagattccctttcatagagcaggtttgaaacactcgttctggagtatctggatgtggacatttggagcgctttgatgcctacggtggaaaagtaaatatcttcccataaaaacgagacagaaggattctcagaaacaagtttgtgatgtgtgttctcagctaacagagtggaacctttctttttacagagcagctttgaaacgctatttttgtggattctgcaaattgatatttagattgctttaacgatatcgttggaaaagggaatatcgtcatacaaaatctagacagaagcattctcacaaacttctttgtgatgtgtgtcctcatctaacagagttgaacctttcttttgatgcagcagtttggaaacactctttttgtagaaactgtaactggatatttggatagctctaacgatttcgttggaaacgggaatatcatcatctaaaatctagacagaagcactattagaaactacttggtgatatctgcattcaagtctcagagttgaacattcccttacttgagcacgtttgaaacactcttttggaagaatctggaagtggacatttggagcgctttgatgcctttggtgaaaaggaaacgtcttccaataaaagccagacagaagcattctcagaaacttgttcgtgatgtgtgtactcaactaaaagagttgaacctttctattgatagagcagttttgaaacactctttttgtggattctgcaagtggatatttggattgctttgaagatttcgttggaagcgggaattcgtataaacactagacagcagcattcccagaaatttctttcggatatttccattcaactcatagagatgaacatggcctttcatagagcaggtttgaaacactctttttgtagtttgtggaagtggacatttcgatcgccttgacgcctacggtgaaaaaggaaatatcttcccataaaaaatagacagaagcattctcagaaacttgttggcgatatgtgtcctcaactaacagagtttaactttgccattgatagagagcagttttgaaacactctttttgtggaatctgcaagtggatatttggatagcttggaggatttcgttggaagcgggaattcaaataaaaggtagacagcagcattctcagaaatttctttctgatgtctgcattcaactcatagagttgaacattccctttcatagagcaggtttgaaatactctttctgtagtatctggatgtggacatttggagcgctttgatgcctacgatgaaaaagtaaatatcttcccataaaaacgagacagaaggattctcagaaacaagttggtgatgtgtgtactcagctaacagagtggaacctctcttttgatgcagcagtttggaaacactctttttgtagaaactgtaagtggatatttggatagctctaatgatttcgttggaaacgggaatatcatcatctaaaatctagacagaagcactctcagaaactactttgtgatatctgcattcaagtcacagagttgaacattcggtttcttagagcacgtttgaaacactctttttgtagtgtctggaagtggacatttggagcgctttgattcctttggtgaaaaagggaatgtctacccataaaaactagacagaagcattctcagaaacttgtttgtgatgtgtgtacccagccaaaggagttgaacatttctattgatagagcagttttgaaacgctctttttgtggaaaatgcaggtggatatttggatagcttggaggatttcgttggacgcgggaattcaaataaaaggtagacagcagcattctcagaaatttctttctgatgtctgcattcaactcatagagttgaagattccctttaatggagcaggtttgaaacactcgttctgcagtatctggatgtggacatttggagcgctttgatgcctacggtggaaaagtaaatatcttcccataaaaacgagacagaaggattctcagaaacaagtttgtgatgtgtgtactcagctaacagagtggaacctttctttttacagagcagctttgaaactctatttttgtggattctgcaaatggatatttagattgctttaacgatatcgttggaaaagggaatatcgtcatacaaaatctggacagaagcattctcacaaacttctttgtgatgtgtgtcctcaactaacagagttgaacctttcttttgatgcagcagtttggaaacactcttttggtagaaactgtaagtggatatttggatagctctaacgatttcgttggaaacgggaatatcatcatctaaaatctagacagaagcactattagaaactacttggtgatatctgcattcaagtcacagagttgaacattcccttactttgagcacgtttgaaacactcttttggaagaatctggaagtggacatttggagcgctttgatgcctttggtgaaaaggaaacgtcttccaataaaagccagacagaagcattctcagaaacttgtttgtgatgtgtgtactcaactaaaagagttgaacctttctattgatagagcagttttgaaacactctttttgtggattctgcaagtggatatttggattgctttgaggatttcgttggaagcggcaattcgtataaaaactagacagcagcattcccagaaatttctttcggatatttccattcaactcatagagatgaacatggcctttcatagagcaggtttgaaacactctttttgtagtttgtggaagtggacatttcgatcgccttgacgcctacggtgaaaaaggaaatatcttcccataaaaaatagacagaagcattctaagaaacttgttggtgatatgtgtcctcaactaacagagttgaactttgccattgatagagagcagttttgaaacactctttttgtggaatctgcaagtggatatctggatagcttggaggatttcgttggaagcgggaattcaaataaaaggtagacagcagcattctcagaaatttctttctgatctctgcattcaactcatagagttgaacattccctttcatagggcaggtttgaaatactctttctgtagtatctggatgaggacatttggagcgctttgatgcctacagtgaaaaagtaaatatcttcccataaaaacgagacagaaggattctgagaaacaagtttgtgatgtgtgtactcagctaacagagtggaacctctcttttgatgcagcagtttggaaacactctttttgtagaaactgtaagtggatatttggatagctctaatgatttcgttgaaaacgggaatatcatcatctaaaatctagacagaagccctctcagaaactactttgtgatatctgcattcaagtcacagagttgaacattcggtttcttagagcacgtttgaaacactctttttgtagtgtctggaagtggacatttggagcgctttgatgcctttggtgaaaaagggaatgtctacccataaaaactagacagaagcattctcagaaacttgtttgtgatgtgtgtacccagccaaaggagttgaacatttaaattgatagagcagttgtgaaacactcttgttgtggaaaatgcaggtggatatttggatacttggaggatttcgttggaagcgggaattcaaataaaaggtagacagcagcattctcagaaatttctttctgatgtctgcattcaactcatagagttgaagattccctttcatagagcaggtttgaaacactcgttctggagtatctggatgtggacatttggagcgctttgatgcctacgttggaaaagtaaatatcttcccataaaaacgagacagaaggattctcagaaacaagtttgtgatgtgtgtactcagctaacagagtggaacctttctttttacagagcagctttgaaactctatttttgtggattctgcaaatttatatttagattgctttaacgatatcgttggaaaagggaatatcgtcatacaaaatctagacagaagcattctcacaaacttctttgtgacgtgtgtcctcaactaacagagttgaacctttcttttgatgcagcagtttggaaacactgtttttgtagcaactgtaagtggatatttggatagctctaacgatttcgttggaaacgggaatatcatcatctaaaatctagacagaagcactattagaaactacttggtgatatctgcattcaagtcacagagttgaacattcccttacttcgaccacgtttgaaacactcttttggaagaatctggaagtggacatttggagcgctttgatgcctttggtgaaaaggaaacgtcttccagtaaaagccagacagaagcattctcagaaacttgttcgtgatgtgtgtactcaactaaaagagttgaacctttctattgatagagcagttttgaaacactctttttgtggattctgcaagtggatatttggattgctttgaggatttcgttggaagcgggaattcgtataaacactagacagcagcattcccagaaatttctttcggatatttccattcaactcatagagatgaacatggcctttcatagagcaggtttgaaacactctttttgtagtttgtggaagtggacatttcgaacgccttgacgcctacggtgaaaaaggaaatatcttcccataaaaaatagacagaagcattctcagaaacttgttggtgatatgtgtcctcaactaacagagttgaactttgccattgatagagagcagttttgaaacactctttttgtggaatctgcaagtggatatttggatagcttggaggatttcgttggaagcgggaattcaaataaaaggtagacagcagcattctcagaaatttctttctgatgtctgcattcaactcatagagttgaagattccctttcatagagcaggtttgaaacactctttctggagtatctggatgtggacatttggagcgctttgatgcctacggtgaaaaagtaaatatcttcccataaaatcgacacagaaggattctcagaaacaagtttgtgatgtgtgtactcagctaacagagtggaacctctcttttgatgcagcagtttggaaacactctttttgtagaaactgtaagtggatatttggatagctctgatgatttcgttggaaacgggaatatcatcatgtaaaaactagacagaagcactctcagaaactactttgtgatatctgcattcaagtcacagagttgaacattcgctttcttagagcacttttgaaacactctttttgtagtatctggaagtggacatttggagctctttgatgcctttggtgaaaaaggaaatgtcttcccataaaaactagacagaagcattctcagaaacttgtttgtgatgtgtgtacccagccaaaggagttgaacatttctattgatagagcacgtttgaaacactctttttgtggaaaatgcaggtggatatttggatagcttggaggatttcgttggaagcgggaattcaaataaaaggtagacagcaggattctcagaaacaagtttgtgatgtgtgtactcagctaacagagtggaacctttctttttacagagcagctttgaaactctatttctgtggattctgcaaattgatatttagattgctttaacgatatcgttggaaaagggaatatcgtcatacaaaatctagacagaagcattctcacaaacttctttgtgatgtgtgtcctcaactaacagagttgaacctttcttttgatgcagcaatttggaaacacccttttggtagaaactgtaactggatatttggatagctctaacgatttcgttggaaacgggaatatcatcatctaaaatgctagacagaagcactattagaaactacttggtgatatctgcattcaagtcaaagagttgaacattcccttactttgagcacgtttgaaacactcttttggaagaatctggaagtggacatttgtagcgctttgatgatgcctttggtgaaaagaaaacgtcttccaataaaagccagacagaagcattctcagaaacttgttcgtgatgtgtgtactcaactaaaagagttgaacctttctattgatagagcagttttgaaacactctttttgtggattctgcaagtggatatttggattgctttgaggatttcgttggaagcgggaattcgtataaacactagacagcagcattcccagaaatttctttcggatatttccattcaactcatagagatgaacttggcctttcatagagcaggtttgaaacactctttttgtagtttgtggaagtggacatttcgatcgcgttgacgcctacggtgaaaaaggaaatatcttcccataaaaaatagacagaagcattctcagaaacttgttggtgatatgtgtcctcaactaacagagttgaactttgccattgatagagagcagttttgaaacactctttttgtggaatctgcaagtggatatttggatagcttggaggatttcgttggaagcgggaattcaaataaagggtagacagcagcattctcagaaatttatttctgatgtctgcattcaactcatagagttgaacattccctttcatagagcaggtttgaaatactctttctgtagtatctggatgtggacatttggagcgctttgaggcctacgatgaaaaagtaaatatcttcccataaaaacgagacagaaggattctgagaaacaagtttgtgatgtgtgtactcagctaacagagtggaaactctcttttgatgcagcagtttggaaacactctttttgtagaaactgtaagtggatatttggatagctctaatgatttcgttggaaacgggaatatcatcatctaaaatctagacagaagcactctcagaaactactgtgtgatatctgcattcaagtcacagagttgaacattcgctttcttagagcacgtttgaaacactctttttgtagtgtctggaagtggacatttggagcgctttgattcctttggtgaaaaagggaatgtctacccataaaaactagacagaagcattctcagaaacttgtttgtgatgtgtgcacccagctaaaggagttgaacatttctattgatagagcagttttgaagcactctttttgtggaaaatgcaagtggatatttggatagcttggaggatttcgttggaagcgggagttcaaataaaaggtagacagcagcattctcagaaatttctttctgatgtctgcattcaactcatagagttgaagattccctttcatagagcaggtttgaaacactctttctggagtatctggatgtggacatttggagcgctttgatgtctacggtgaaaaagtaaatatcttcccataaaaacgagacagaaggattctcagaaacaagtttgtgatgtgtgtactcagctaacagagtggaaactttctttttacagagcagctttgaaactctatttttgtggattctgcaaattgatatttggtttgcattaacgatatcgttggaaaagggaatatcgtcatacaaaatctaaacagaagcattctcacaaacttctttgtgatgtgtgtcctcaactaacagagttgaacctttcttttgatgcagcaatttggaaacacccttttggtagaaactgtaactggatatttggatagctctagcgatttcgttggaaacgggaatatcatcatctaaaatgtagacagaagcactattagaaactacttggtgatatctgcattcaagtcacagagttgaacattcccttactttgagcacgcttgaaacactcttttggaagaatctggaagtggacatttggagcgctttgatgcctttggtgaaaaggaaacgtcttccaataaaagccagacagaagcattctcagaaacttgtttgtgatgtgtgtactcaactaaaagagttgaacctttctattgatagagcagttttgaaacactctttttgtggattctgcaagtggatatttggattgctttgaggatttcgttggaagcgggaattcgtataaaaactagacagcagcattcccagaaatttctttcggatatttccattcgactcatagagatgaacatggcctttcatagagcaggtttgaaacactctttttgtagtttgtggaagtggacatttcgatcgccttgacgcctacggtgaaaaaggaaatagcttcccataaaaaatagacagaagcattctcagaaacttgttggtgatatgtgtcctcaactaacagagttgaactttgccattgatagagagcagttttgaaacactctttttgtggaatctgcaagtggatatttggatagcttggaggatttcgttggaagcgggaattcaaataaaaggtagacagcagcattctcagaaatttctttctgatgtctgcattcaactcatagagttgaagattccctttcatagagcacgtttgaaacactctttctgtagtatctggatgtggacatttggagcgctttgatgcctacggtgaaaaagtaaatatcttcccataaaaacgagacagaaggattctgagaaacaagtttgtgatgtgtgtactcagctaacagagtggaacctctcttttgatgcagcagtttggaaacactctttttgtagaaactgtaagtggatatttggatagctctaatgatttcgttggaaacgggaatatcatcatctaaaatctagacagaagccctctcagaaactactttgtgatatctgcattcaagtcacagagttgaacattcgctttcttagagcacgttggaaacactcgttttgtagtgtctggaagtggacatttggagcgctttgatgcctttggtgaaaaagggaacgtcttcccataaaaactagacagaagcattctcagaaacttgtttgtgatgtgtgtacccagccaaaggagttgaacatttctattgatagagcagttttgaaacactctttttgtggaaaatgcaagtggatatttggatagcttggaggatttcgttggaagcgggaattcaaataaaaggtagacagcagcattctcagaaatttctttctgatgtctgcattcaactcatagagttgaagattccctttcatagagcaggtttgaaacactctttctggagtatctggatgtggacatttggagcgctttgatgcctacggtgaaaaagtaaatatcttcccataaaaacgagacagaaggattctcagaaacaagtttgtgatgtgtgtactcagctaacagagtggaacctttctttttacagagcagctttgaaactctatttttgtggattctgcaaatggatatttagattgctttaacgatatcgttggaaaagggaatatcgtcatacaaaatctggacataagcattctcacaaacttctttgtgacgtgtgtcctcaactaacagagttgaacctttcttttgatgcagcaatttggaaacacccttttggtagaaactgtaactggatatttggatagctctagcgatttcgttggaaacgggaatatcatcatctataatctagacagaagcactattagaaactacttggtgatatctgcattcaagtcacagagttgaacattcccttacttcgagcacgtttgaaacactcttttggaagaatctggaagtggacatttggagcgctttgatgcctttggtgaaaaggaaacgtcttccaataaaagccagacagaagcattctcagaaacttgtttgtgatgcgtgtactcaactaaaagagttgaacctttctattgatagagcagttttgaaacactctttttgtggattctgcaagtggatatttggattgctttgaggatttcgttggaagcgggaattcgtataaaaactagacagcagcattcccagaaatttctttcggatatttccattcaactcatagagatgaacatggcctttcatagagcaggtttgaaacactctttttgtagtttgtggaagtggacatttcgatcgccttgacgcctacggtgaaaaaggaaatatcttcccataaaaaatagaagcattctcagaaacttgttggtgatatgtgtcctcaactaacagagttgaactttgccattgatagagagcagttttgaaacactctttttgtggaatctgcaagtggatatttggatagcttggaggatttcgttggaagcgggaattcaaataaaaggtagacagcagcattctcagaaatttctttctgatgtctgcattcaactcatagagttgaacattctctttcatagagcaggtttgaaacactctttctggagtatctggatgtggacatttggagcgctttgatgcctacggtgaaaaagtaaatatcttcccataaaaacgagacagaaggattctgagaaacaagtttgtgatgtgtgtactcagctaacagagtggaacctctcttttgatgcagcagtttggaaacactctttttgtagaaactgtaagtggatatttggatagctctaatgatttcgttggaaacgggaatatcatcatctaaaatctagacagaagcactctcagaaactactttgtgatatctgcattcaagtcacagagttgaacattcgctttcttagagcacgtttgaaacactctttttgtagtgtctggaagtggacatttggagcgctttgaattgcctttggtgaaaaagggaatgtcttcccataaaaactagacagaagcattctcagaaacttgtttgtgatgtgtgtacccagccaaaggagttgaacatttctattgatagagcaggtttgaaacactctttttgtggaaaatgcaggtggatatttggatagcttggaggatttcgttggaagcgggaattcaaataaaaggtagacagcaagcattctcagaaatttctttctgatgtctgcattcaactcatagagttgaagattccctttcatagagcaggtttgaaacactcgttctggagtatctggatgtggacatttggagcgctttgatgcctacggtggaaaagtaaatatcttcccataaaaacgagacagaaggattctcagaaacaagtttgtgatgtgtgtactcagctaacagagtggaacctttctttttacagagcagctttgaaactctatttttgtggattctgcaaattgatatttagattgctttaacgatatcgttggaaaagagaatatcgtcatacaaaatctagacagaagcattctcacaaacttctttgtgatgtgtgtcctcaactaacagagttgaacctttcttttgatgcagcaatttggaaacacccttttggtagaaactgtaactggatatttggatagctctaacgatttctttggaaacgggaatatcatcatctaaaatctagacagaagcactattagaaactacttggtgatatctgcattcaagtcacagagttgaacattcccttacttcgaccacgtttgaaacactcttttggaagaatctggaagtggacatttggagcactttgatgcctttggtgaaaaggaaacgtcttccaataaaagccagacagaaagcattctcagaaacttgttcgtgatgtgtgtactcaactaaaagagttgaacctttctattgatagagcagttttgaaacactctttttgtggattctgcaagtggatatttggattgctttgaggatttcgttggaagcgggaattcgtataaacactagacagagcattcccagaaatttctttcggatatttccattcaactcatagagatgaacatggcctttcatagagcaggtttgaaacacactttttgtagtttgtggaagtggacatttcgatcgccttgacgcctacggtgaaaaaggaaatatcttcccataaaaaatagacagaagcattctcagaaacttgtttgtgatgtgtgtactcaactaaaagagttgaacctttctattgatagagcagttttgaaacgctctttttgtggaatctgcaagtggatatttggatagcttggaggatttcgttggaagcgggaattcaaataaaaggtagacagcagcattctcagaaattactttctgatgtctgcattcaactcatagagttgaagattccctttcatagagcaggtttgaaacactctttctgtagtatctggatgtggacatttggagcgctttgatacctacggtgaaaaagtaagtatcttcccataaaaactagacagaaggattctgagaaacaagtttgtgatgtgtgtactcagctaacagagtggaacctctcttttgatgcagcagtttggaaacactctttttgtagaaactgtaagtggatatttggatagctctaatgatttcgttggaaacgggaatatcatcatctaaaatctagacagaagcactctcagaaactactctgtgatatctgcattcaagtcacagagttgaacattcgctttcatagagcacgtttgaaacactctttttgtagtgtctggaagtggacatttggagcgctttgatggctttggtgaaaaagggaatgtcttcccataaaaactaggcagaagcattctcagaaacttgtttgtgatgtgtgtacccagccaaaggagttgaacatttctattgatagagcagttttgaaacactcttgttgtggaaaatgcaagtggatatttggatagcttggaggatttcgttggaagcgggaattcaaataaaaggtagacagcaggattctcagaaacaagtttgtgatgtgtgtactcagctaacagagtggatcctacctttttacagagcagctttgaaactctatttctgtggattctgcaaattgatatttgggttgatttaatgatatcgatggaaaagggaatatcttcatacaaaatctagacagaagcattctcacaaacttctttgtgatgtgtgtcctcaactaacagagttgaacctttcttttgatgcagcagtttgaaaacactctttttgtagaaactgtaactggatatttggatagctctaacgatttcgttggaaacgggaatatcatcatctaaaatctagacagaagcactattagaaactacttggtgatatctgcattcaagtcacagagttgaacattcccttactttgagcacgtttgaaacactcttttggaagaatctggaagtggacatttggagcgctttgatgcctttggtgaaaaggaaacgtcttccaataaaagccagacagaagcattctcagaaacttgttggtgatgtgtgtactcaactaaaagagttgaacctttctattgatagagcagttttgaaacactctttttgtggattctgcaagtggatatttggattgctttgaggatttcattggaagcgggaattcatataaaaactagacagcagcattcccagaaatttctttcggatatttccattcaactcatagagatgaacatggcctttcatagagcaggtttgaaacactctttttgtagtttgtggaagtggacatttcgatcgccttgacgcctacgctgaaaaaggaaatatcttcccataaaaaatagacagaagcattctcagaaacttgttggtgatatgtgtcctcaactaacagagttgaactttgccattgatagagagcagttttgaaacactctttttgtggaatctgcaagtggatatttggatagcttggaggatttcgttggaagcgggaattcaaataaaagtagacagcagcattctcagaaatttctttctgatgtctgcattcaactcatagagttgaagatcccctttcatagagcaggtttgaaacactctttctggagtatctggatgtggacatttggagcgctttgatgcctacggtgaaaaagtaaatatcttcccataaaaacgagacagaaggattctgagaaacaagtttgtgatgtgtgtactcagctaacagagtggaacctctcttttgatgcagcagtttggaaacactctttttgtagaaactgtaagtggatatttggatagctctaatgatttcgttggaaacgggaatatcatcatctaaaatctagacagaagcactctcagaaactactttgtgatatctgcattcaagtcacagagttgaacattcgctttcttagagcacgtttgaaacactctttttgtagtgtctggaagtggacatttggagcgctttgatgtctttggtgaaaaagggaatgtcttcccataaaaactagacagaaagcattctcagaaacttgtttgtgatgtgtgtacccagccaaaggagttgaacatttctattgatagagcagttttgaaacgctctttttgtggaaaatgcaggtggatatttggatagcttggaggatttcgttggaagcgggaattcaaataaaaggtagacagagcattctcagaaatttctttctgatgtctgcattcaactcatagagttgaagattccctttcatagagcaggtttgaaacactctttctggagtatctggatgtggacatttggagcgctttgatgcctacggtgaaaaagtaaatatcttcccataaaaacgagacagaaggattctcagaaacaagtttgtgatgtgtgtactcagctaacagagtggaacctttctttttacagagcagctttgaaactctatttttgtggattctgcaaattgatatttagattgctttaacgataatcgttggaaaagggaatatcgtcatacaaaatctagacagaagcattctcacaaacttctttgtgatgtgtgtcctcaactaacagagttgaacctttcttttgatgcagcaatttggaaacacccttttggtagaaactgtaactggatatttggatagatctaacgatttcgttggaaacgggaatatcatcatctaaaatgtagacagaagcactattagaaactacttggtgatatctgcattcaagtcaaagagttgagcattcccttactttgagcacgtttgaaacactcttttggaagaatctggaagtggacatttggagcgctttgatgcctttggtgaaaaggaaacgtcttccaataaaagccagacagaagcattctcagaaacttgtttgtgatgtgtgtactcaactaaaagagttgaacctttctattgatagagcagttttgaaacactctttttgtggattctgcaagtggatatttggattgctttgaggatttcgttggaagcgggaattcgtataaaaactagacagcagcattcccagaaatttctttcggatatttccattcaactcatagagatgaacatcgcctttcatagagcaggtttgaaacactctttttgtagtttgtggaagtggacatttcgatcgccttgacgcctacggtgaaaaagaaaatatcttcccataaaaaatagacagaagcattctcagaaacttgttggtgatatgtgtcctcaactaacagagttgaactttgccattgatagagagcagttttgaaacactctttttgtggaatctgcaagtggatatttggatagcttggaggatttcgttggaagcgggaattcaaataaaaggtagacagcagcattctcagaaatttctttctgatgtctgcattcaactcatagagttgaacattccctttcatagggcaggtttgaaatactctttctgtagtatctggatgtggacatttggagcgctttgatgcctacggtgaaaacgtaaatatcttcccataaaaacgagacagaaggattctgagaaacaagtttgtgatgtgtgtactcagctaacagagtggaacctctcttttgatgcagcagtttggaaacactctttttgtagaaactgtaagtggatatttggatagctttaatgatttcgttggaaacgggaatatcatcatctaaaatctagacagaagccctctcagaaactactttgtgatatctgcattcaagtcacagagttgaacattcgctttcttagagcacgtttgaaacactctttttgtagtgtctggaagtggacatttggagcgctttgattccttttgtgaaaaagggaatgtctacccataaaaactagacagaagcattctcagaaacttgtttgtgatgtgtgtacccagccaaaggagttgaacgtttctattgatagagcagttttgaaacactcttgttgtggaaaatgcaagtggatatttggatagcttggaggatttcgttggatgcgggaattcaaataaaaggtagacagcagcattctcagaaatttctttctgatgtctgcattcaactcatagagttgaagattccctttcatagagcaggtttgaaacactcgttctggagtatctggatgtggacatttggagcgctttgatgcctacggtggaaaagtaaatatcttcccataaaaacgagacagaaggattctgagcaaacaagtttgtgatgtgtgtactcagctaacagagtggaacctttctttttacagagcagctttgaaactctatttttgtggattctgcaaatggatatttagattgctttaacgatatcgttggaaaagggaatatcgtcatacaaaatctagacagaagcattctcacaaacttctttgtgatgtgtgtcctcaactaacagagttgaacctttcttttgatgcagcagtttggaaacactgtttttgtagcaactgtaagtggatatttggatagctctaacgatttcgttggaaacgggaatatcatcatctaaaatctagacagaagcactattagaaactacttggtgatatctgcattcaagtcacagagttgaacattcccttactttgagcacgtttgaaacactcttttggaagaatctggaagtggacatttggagcgctttgatgcctttggtggaaaggaaacgtcttccaataaaagccagacagaagcattctcagaaacttgttcgtgatgtgtgtactcaactaaaagagttgaacctttctattgatagagcagttttgaaacactctttttgtggattctgcaagtggatatttggattgctttgaggatttcgttggaagcgggaattcgtataaacactagacagcagcattcccagaaatttctttcggatatttccattcaactcatagagatgaacatggcctttcatactgaaacactctttttgtagtttgtggaagtggacatttcgatcgccttgacgcctacggtgaaaaaggaaatatcttcccataaaaaatagacagaagcattctcagaaacttgttggtgatatgtgccctcaactaacagagttgaactttgccattgatagagagcagttttgaaacactctttttttggaatctgcaagtggatatttggatagcttggaggatttcgttggaagcgggaattcaaataaaaggtagacagcagcattctcaggaaatttctttctgatctctgcattcaactcatagagttgaacattccctttcatagggcaggtttgaaatactctttctggagtatctggatgtggacatttggagcgctttgatgcctacggtgaaaaagtaaatatcttcccataaaaacgagacagaaggattctcagaaacaagtttgtgatgtgtgtactcagctaacagagtggaacctgtcttttgatgcagcagtttggaaacactttttttgtagaaactgtaagtggatatttggatagctctaatgatttcgttggaaacgggaatatcatcatctaaaatctagagagaagccctctcaaaaactactttgtgatatctgcattcaagtcacagagttgaacattcgctttcttagagcacgtttgaaacactctttttgtagtgtctggaagtggaaatttggagcgctttgatgcctttggtgaaaaagggaatatcttccaataaaaactagacagaagcattctcagaaacttgtttgtgatgtgtgcacccagctaaaggagttgaacatttattgatagagcagttttgaagcactctttttgtggaaaatgcaagtggatatttggatagcttggaggatttcgttggaagcaggagttcaaataaaaggtagacagcagcattctcagaaatttctttctgatgtctgcattcaactcatagagttgaagattccctttcatagagcaggtttgaaacactctttctggagtatctggatgtggacatttggagcgctttgatgcctacggtgaaaaagtaaatatcttcccataaaaacgagacagaaggattctgagagacaagtttgtgatgtgtgtactcagctaacagagtggaacctttctttttacagagcagctttgaaactctatttttgtggattctgcaaatggatatttagattgctttaacgatatcgttggaaaagggaatatcgtcatacaaaatctggacagaagcattctcacaaacttctttgtgacgtgtgtcctcaactaacagagttgaacctttcttttgatgcagcagtttggaaacactctttttgtagaaactgtaagtggatatttggatagctctaacgatttcgttggaaacgggaatatcatcatctaaaatctagacagaagcactattagaaactacttggtgatatctgcattcaagtcacagagttgaacattcccttactttgagcacgtttcaaacactcttttggaagaatctggaagtggacatttggagcgctttgatgcctttggtgaaaaggaaacgtcttccaataaaagccagacagaagcaatctcagaatcttctttgggatatatgcacgcagctaacagagttgaacctttctattgacagagcagttttgaaacactctttttgtggattctgcaagtggatatttggattgctttgaggatttcgttggaagcgggaattcgtataacaactagacagcagcattcccagaaatttcttttggatatttccattcaactcatagagatgaacatggcctttcatattgaaacactctttttgtagtttgtggaagtggacatttcaatcgccttgacgcctacggtgaaaaaggaaatatcttcccataaaaaatagacagaagcattctcagaaacttgttggtgatatgtgtcctcaactaacagagttgaactttgccattgatagagagcagttttgaaacactctttttgtggaatctgcaagtggatatttggatagcttggaggatttcgttggaagcgggaattcaaattaaaggtagacagcaggattctgagaaacaagtttgtgatgtgtgtactcagctaacagaggggaacctctcttttgatgcagcagtttggaaacactctttttgtagaaactgtaagtggatatttggatagctctaatgatttcgttggaaacgggaatatcatcatctaaaatctagacagaagccctctcagaaactactttgtgatatctgcattcaagtcacagagttgaacattcggtttcttagagcacgtttgaaacactctttttgtagtgtctggaagtggacatttggagcgctttgatgcctttggtgaaaaagggaatgtcttcccataaaaactagacagaagcattctcagaaacttgtttgtgatgtgtgtacccagccaaaggagttgaacatttctattgatagagcagttttgaaacactcttgttgtggaaaatgcacgtggatatttggatagcttggaggatttcgttggaagcgggaattcaaataaaaggtagacagcagcattctcagaaatttctttctgatgtctgcattcaactcatagagttgaagattccctttcatagagcaggtttgaaacactctttctggagtatctggatgtggacatttggagcgctttgatgcctacggtgaaaaagtaaatatcttcccataaaaacgagacagaaggattctcagaaacaagtttgtgatgtgtgtactcagctaacagagtggaacctttctttttacagagcagctttgaaactctatttttgtggattctgcaaattgatatttagattgctttaacgatatcgttggaaaagggaatatcgtcatagaaaatctagacagaagcattctcacaaacttctttgtgatgtgtgtcctcaactaacagagttgaacctttcttttgatgcagcaatttggaaacacccttttggtagaaactgtaactggatatttggatagctctagcgacttcgttggaaacgggaatatcatcatctaaaatctagacagaagcactattagaaactacttggtgatatctgcattcaagtcacagagtagaacattcccttacttcgagcacgtttgaaacactcttttggaagaatctggaagtggacatttggagcgctttgatgcctttggtgaaaaggaaacgtcttccaataaaagccagacagaagcattctcagcaaacttgttggtgatgtgtgtactcaactaaaagagttgaacctttctattgatagagcagttttgaaacactctttttgtggattctgcaagtggatatttggattgcttagaggatttcgttggaagcgggaattcgtataaacactagacagcagcattcccagaaatttctttcggatatttccattcaactcatagagatgaacatggcctttcatagagcaggtttgaaacactctttttgtagtttgtggaagtggacatttcgatcgccttgacgcctacggtgaaaaaggaaatatcttcccataaacaatagacagaagcattctcagaaacttgtttgtgatgtgtgtacccagccaaaggagttgaacatttctattgatagagcagttttgaaacactcttgttgtggaaaatgcaggtggatatttggatagcttggaggatttcgttggaagcgggaattctaataaaaggtagacagcagcattctcagaaattactttctgatgtgtgcattcaacccatagagttgaagaatccctttcatagagcaggtttgaaacactctttctgtagtatctggatgaggacatttggagcgctttgatacctacggtgaaaaagtaaatatcttcccataaaaactagacagaaggattctgagaaacaagtttgtgatgtgtgtactcagctaacagagtggaacctctcttttgatgcagcagtttggaaacactctttttgtagaaactgtaagtggatatttggatagctctaatgatttcgttggaaacgggaatatcatcatctaaaatctagacagaaagcactctcagaaactactgtgtgatatctgcattcaagtcacagagttgaacattcgctttcttagagcacgtttgaaacactctttttgtagtgtctggaagtggacatttggagcgctttgattcctttggtgaaaaagggaatgtctacccataaaaactagacagaagcattctcagaaacttgtttgtgatgtgtgtacccagccaaaggagttgaacatttctattgatagagcagttttgaaacactctttttgtggaaaatgcaggtggatatttggatagcttggaggatttcgttggaagcgggaattcaaataaaaggtagacagcagcattctcagaaatttctttctgatgtctgcattcaactcatagagttgaagattccctttcatagagcaggtttgaaacaccctttctggagtatctggatgtggacatttggagcgctttgatgcctgcggtgaaaaagtaaatatcttcccataaaaacgagacagaaggattctcagaaacaagtttgtgatgtgtgtactcagctaaaagagtggaacctttctttttacagagcagctttgaaagtctatttttgtggattctgcaaattgatatttagattgctttaacgatatcgttggaaaagggaatatcgtcatacaaaatctagacagaagcattctcacaaacttctttgtgatgtgtgtcctcaactaacagagttgaacctttcttttgatgcagcaatttggaaacacccttttggtagaaactgtaactggatatttggatagctctaacgatttcgttgtaaacgggaatatcatcatctaaaatctagacagaagcactattagaaactacttggtgatatctgcattcaagtcacagagttgaacattcccttacttcgagcacgtttgaaacactcttttggaagaatctggaagtggacatttggagcgctttgatgcctttgttgaaaaggaaacgtcttccaataaaagccagacagaagcattctcagaaacttgttcgtgatgtgtgtactcaactaaaagagttgaacctttctattgatagagcagttttgaaacactctttttgtggattctgcaagtggatatttggattgctttgaggatttcgttggaagcgggaattcgtataaacactagacagcagcattcccagaaatttctttcggatatttccattcaactcatagagatgaacatggcctttcatagagcaggtttgaaacactctttatgtagtttgtggaagtggacatttcgatcgccttgacgcctacggtgaaaaaggaaatatcttcccataaaaaatagacagaagcattctcagaaacttgttggtgatatgtgtcctcaactaacagagttgaactttgccattgatagagagcagttttgaaacactctttttcctgaatctgcaagtggatatttggatagttgggaggatttcgttggaagcgggaattcaaataaaaggtagacagcagcattctcagaaatttctttctgatgtctgcattcaactcatagagttgaacattccctttcatagggcaggtttgaaatactctttctgtagtatctggatgtggacatttggagcgctttgatgcctacggtgaaaaagtaaatatcttcccataaaaacgagacagaaggattctgagaaacaagtttgtgatgtgtgtactcagctaacagagtggaacctctcttttgatgcagcagtttggaaacactctttttgtagaaactgtaagtggatatttggatagctctaatgatttcgttggaaacgggaatatcatcatctaaaatctagacagaagccctctcagaaactactttgtgatatctgcattcaagtcacagagttgaacattcgctttcttagagcacgttggaaacactctttttgtagtgtctggaagtggacatttggagcgctttgatgcctttggtgaaaaagggaacgtcttcccataaaaactagacagaagcattctcagaaacttgtttgtgatgtgtgtacccagctaaaggagttgaacatttctattgatacagcagttttgaaacactctttttgtggaaaatgcaagtggatatttggatagcttggaggatttcgttggaagagggaattcaaataaaaggtagacagcagcattctcagaaatttctttctgatgtctgcattcaaatcatagagttgaagattccctttcatagagcaggtttgaaacactctttctggagtatctggatgtggacatttggagcgctttgatgcctacggtggaaaagtaaatatcttcccataaaaacgagacagaaggattctcagaaacaagtttgtgatgtgtgtactcagctaacagagtggaacctttctttttacagagcagctttgaaactctatttttgtggattctgcaaattggtatttagattgctttaacgatatcgttggaaaagggaatatcgtcatgcaaaatctagacagaagcattctcacaaacttctttgtgatgtgtgccctcaactaacagagttgaacctttcttttgatgcagcaatttggaaacacccttttggtagaaactgtaactggatatttggatagctctaacgatttcgttggaaacgggaatatcatcatctaaaatgtagacagaagcactattagaaactacttggtgatatctgcattcaagtcacagagttgaacattcccttacttcgagcacgtttgaaacactcttttggaagaatctggaagtggacatttggagcgctttgatgcctttggtgaaaaggaaacgtcttccaataaaagccagacagaagcattctcagaaacttgtttgtgatgtgtgtactcaactaaaagagttgaacctttctattgatagagcagttttgaaacactctttttgtggattctgcaagtggatatttggattgctttgaggatttcgttggaagcgggaattcgtataaaaactagacagcagcattcccagaaatttctttcggatatttccattcgactcatagagatgaacatggcctttcatagagcaggtttgaaacactctttttgtagtttgtggaagtggacatttcgatcgccttgacgcctacggtgaaaaaggaaatatcttcccataaaaaatagacagaagcattctcagaaactagtttgtgatgtgtgtacccagccaaaggagttgaacatttctattgatagagcagttttgaaacactcttgttgtggaaaatgcaggtggatatttggatagcttggaggatttcgttggaagcgggaattcaaataaaaggtagacagcagcattctcagaaatttctttctgatgtctgcattcaactcatagagttgaagattccctttcatagagcaggtttgaaacactctttctggagtatctggatgtggacatttggagcgctttgatgcctacggtgaaaaagtaaatatcttcccataaaaacgagacataaggattctgagaaacaagtttgtgatgtgtgtactcagctaacagagtggaacctctcttttgatgcagcagtttggaaacactctttttgtagaaactgtaagtggatatttggatagctctaatgatttcgttggaaacgggaatatcatcatctaaaatctagacagaagccctctcagaaactactttgtgatatctgcattcaagtcacagagttgaacattcgctttcttagagcacgtttgaaacactctttttctagtgtctggaagtggacatttggagcgctttgatgcctttggtgaaaaagggaatgtcttcccataaaaactagacagaagcattctcagaaacttgtttgtgatgtgtgtacccagctaaaggagttgaacatttctattgatagagcagttttgaaacactctttttgtggaaaatgcaagtggatatttggatagcttggaggatttcgttggaagcgggaattcaaataaaaggtagacagcaggattctcagaaacaagtttgtgatgtgtgtactcagctaacagagtggaacctttctttttacagagcagctttgaaactctagttttgtggattctgctaattgatatttagattgctttaacgatatcgttggaaaagggaatatcctcatacaaaatctagacagaagcattctcacaaacttctttgtgatgtgtgtcctcaactaacagagttgaacctttcttttgatgcagcaatttggaaacacccttttggtagaaactgtaactggatatttggatagctctaacgatttcgttggaaacgggaatatcatcatctaaaatgtagacagaagcagtattagaaactacttggtgatatctgcattcaagtcacagagttgaacattcccttactttgagcacgtttgaaacactcttttggaagaatctggaagtggacatttggagcgctttgatgcctttggtgaaaaggaaacgtcttccaataaaagccagacagaagcattctgagaaacttgttcgtgatgtgtgtactcaacaaaaagagttgaacctttctattgatagagcagttttgaaacactctttttgtggattctgcaagtggatatttggattgctttgaggatttcgttggaagcgggaattcgtataaacactagacagcagcattcccagaaatttctttcggatatttccattcaactcatagagatgaacatggcctttcatagagcaggtttgaaacactctttttgtagtttgtggaagtggacatttcgatcgccttgacgcctacggtgaaaaaggaaatatcttcccataaaaaatagacagaagcattctcagaaacttgttggtgatatgtgtcctcaactaacagagttgaactttgccattgatagagagcagttttgaaacactctttttgtggaatctgtaagtggatatttggatagcttggaggatttcgttggaagcgggaattcaaataaaaggtagacagcagcattctcagaaatttctttgtgacgtttgcattcaactcatagagttgaagattccctttcatagagcaggtttgaaacactctttctgtactatctggatgtggacatttggaacgctttgatgcctacggtgaaaaagaaaatatcttcccataaaagctagacagaaggattctgagaaacaagtttgtgatgtgtgtactcagctaacagagtggaacctctcttttgatgcagcagtttggaaacgctctttttgtagaaactgtaagtggatatttggatagttctaatgatttcgttggaaacgggaatatcatcatctaaaatctagacagaagccctctcagaaactactttgtgatatctgcattcaactcacagagttgaacattcggtttcttagagcacgtttgaaacactcttttcgtagtgtctggaagtggacatttggagcgctttgatgccttcggtgaaaaagggaatgtcttcccataaaaactagacagaagcattctcagaaacttgtttgtgatgtgtgtacccagccaaaggagttgaacatttctattgatagagcagttttgaaacactctttttgtggaaaatgcaggtggatatttggacagcttggaggatttcgttggaagcgggaattcaaataaaaggtagacagcagcattctcagaaatttctttctgatgtctgcattcaactcatagagttgaagattccctttcatagagcaggtttgaaacactctttctggagtatctcgatgtggacatttggagcgctttgatgcctacggtgaaaaagtaaatatcttcccataaaaacgagacagaaggattctcagaaacaagtttgtgatgtgtgtactcagctaactgagtggaacctttctttttacagagcagctttgaaactctatttttgtggattctgcaaattgatatttagattgctttaacgatatcgttggaaaagggaatatcgtcatacaaaatctggacagaagcattctcacaaacttctttgtgatgtgtgtcctcaactaacagagttgaacctttctttttatgcagcaatttggaaacacccttttggtagaaactgtaactggatatttggatagctctaacgatttcgttggaaacgggaatatcatcatctaaaatctagacagaagcactattagaaactacttggtgatatctgcattcaagtcacagagtagaacattcccttacttcgagcacgtttgaaacactcttttggaagaatctggaagtggacatttggagcgctttgatgcctttggtgaaaaggaaacgtcttccaataaaagccagacagaagcattctgagaaacttgttggtgatgtgtgtactcaactaaaagagttgaacctttctattgatagagcagttttgaaacactctttttgtggattctgcaagtggatatttggattgctttgaggatttcgttggaagcgggaattcgtataaacactagacagcagcattcccagaaatttctttcggatatttccattcaactcatagagatgaacatggcctttcatagagcaggtttgaaacactctttttgtagtttgtggaagtggacatttcgatcgccttgacgcctacggtgaaaaaggaaatatcttcccataaaaaatagacagaagcattctcagaaacttgttggtgatatgtgtcctcaactaacagagttgaactttgccattgatagagagcagttttgaaacactctttttgtggaatctgcaagtggatatttggatagcttggaggatttagttggaagcgggaattcaaataaaaggtagacagcaggattctgagaaactagtttgtgatgtgtgtactcagctaacagagtggaacctctgttttgatgcagcagtttggaaacactctttttgtagaaactgtaagtggatatttggatagctctaatgatttctttggaaacgggaatatcatcatctaaaatctagacagaagccctctcaaaaactactttgtgatatctgcattcaagtcacagagttgaacattcgctttcttagagcacgtttgaaacactctttttgtagtgtctggaagtggacatttggagcgctttgatgcctttggtgaaaaagggaatgtcttcccataaaaactagacagaagcattctcagaaacttgtttgtgatgtgtgtacccagctaaaggagttgaacatttccattgatagagcagttttgaaacactctttttgtggaaaatgcaagtggatatttggatagcttggaggatttcgttggaagcgggaattcaaataaaaggaaaacgccaggattctcagaaacaagtttgtgatgtgtgcactcagctaacagagtggaacctttctttttacagagcagctttgaaactctatttttgtggattctgcaaatggatatttagattgctttaacgatatcgttggaaaagggaatatcgtcatacaaaatctagacagaagctttctcagaaacttctttgtgatgtgtgtcctcaactaacagagttgaacctttcttttgatgcagcagtttggaaacactctttttgtagaaactgtaagtggatatttggataggtctaacgatttcgttggaaacgggaatatcatcatctaaaatctagacagaagcactattagaaactacttggtgatatctgcattcaagtcacagagttgaacattcccttactttgagcacgtttcaaacactcttttggaagaatctggaagtggacatttggagcgctttgatgcctttggtgaaaaggaaacgtcttccaataaaagccagacagaagcattctcagaaacttgtttgtgatgtgtgtactcaactaaaagagttgaacctttctattgatagagcagttttgaaacactctttttgtggattctgtaagtggatatttggattgctttgaggatttcgttggaagcgggaattcgtataaaaactagacagcagcattcccagaaatttctttcggatatttccattcaactcatagagatgaacatggcctttcatagagcaggtttgaaacactctttttgtagtttgtggaagtggacatttcgatcgccttgacgcctacggtgaaaaaggaaatatcttcccataaaaaatagacagaagcattctcagaaacttgttggtgatatgtgtcctcaactaacagagttgaactttgccattgatagagagcagttttgaaacactctttttcctgaatctgcaagtggatatttgtatagcttggaggatttcgttggaagcgggaattcaaataaatggtagacagcagcattctcagaagtttctttctgatgtctgcattcaactcatagagttgaacattccctttcatagagcaggtttgaaacactctttctggagtatctggatgtggacatttggagcgctttgatgcctacggtgaaaaagtaaatatcttcccataaaaacgagacagaaggattctgagaaacaagtttgtgatgtgtgtactcagctaacagagtggaacctctcttttgatgcagcagtttggaaacactctttttgtagaaactgtaagtggatatttggatagctctaatgatttcgttggaaacgggaatatcatcatctaaaatctagacagaagccctctcagaaactactttgtgatatctgcattcaagtcacagagttgaacattcggtttcttagagcacgttggaaacactctttttgtagtgtctggaagtggacatttggagcgctttgatgcctttggtgaaaaagggaatgtcttcccataaaaactagacagaagcattctcagaaacttgtttgtgatgtgtgtacccagccaaaggagttgaacatttctattgatagagcagttttgaaacactctttttgtggaaaatgcaagtggatatttggatagcttggaggatttcgttggaagcgggaattcaaataaaaggtagacagcagcattctcagaaatttctttctgatgtctgcattcaactcatagagttgaagattccctttcatagagcaggtttgaaacactcgttctggagtatctggatgtggacatttggagtgctttgatgcctacggtggaaaagtaaatatcttcccataaaaacgagacagaaggattctgagaaacaagtttgtgatgtgtgtactcagctaacagagtggaacctttctttttacagagcagctttgaaactctatttttgtggattctgcaaattgatatttagattgctttaacgatatcgttggaaaagggaatatggtcatacaaaatctagacagaagcattctcacaaacttctttgtgatgtgtgtcctcaactaacagagttgaacctttcttttgatgcagcagtttggaaacactgtttttgtagcaactgtaagtggatatttggatagctctaacgatttcgttggaaacgggaatatcatcatctaaaatctagacagaagcactattagaaactacttggtgatatctgcattcaagtcacagagatgaacattcccttacttcgagcacgtttgaaacactcttttggaagaatctggaagtggacatttggagcgctttgatgcctttggtgaaaaggaaacgtcttccaataaaagccagacagaagcattctcagaaacttgttcgtgatgtgtgtactcaactaaaagagttgaacctttctattgatagagcagttttgaaacactctttttgtggattctgcaagtggatatttggattgctttgaggatttcgttggaagcgggaattcgtataaacactagacagcagcattcccagaaatttctttcggatatttccattcgactcatagagatgaacatggcctttcatagagcaggtttgaaacactctttttgtagtttgtggaagtggacatttcagatcgccttgacgcctacggtgaaaaaggaaatatcttcccataaaaaatagacagaagcattctcagaaacttgttggtgatatgtgtcctcaactaacagagttgaactttgccattgatagagaccagttttgaaacactctttttgtggaatctgcaagtggatatttggatagcttggaggatttcgttggaagcgggaattcaaataaaaggtagacagcagcattctcagaaatttctttctgatgtctgcattcaactcatagagttgaacattccctttcatagagcaggtttgaaacactctttctggagtatctggatgtggacatttggagcgctttgatgcctacggtgaaaaagtaaatatcttcccataaaaacgagacagaaggattctgagaaacaagtttgtgatgtgtgtactcaactaacagagtggaacctctcttttgatgcagcagtttggaaacactctttttgtagaaactgtaagtggatatttggatagctgtaatgatttcgttggaaacgggaatatcatcatctaaaatctagacagaaagccctctcagaaactactttgtgatatctgcattcaagtcacagagttgaacattcgctttcttagagcacgtttgaaacactctttttgtagtgtctggaagtggacatttggagcgctttgatgcctttggtgaaaaagggaatgtcttcccataaaaactagacagaagcattctcagaaacttgtttgtgatgtgtgcacccagccaaaggagttgaacatttattgatagagcagttttgaagcactctttttgtggaaaatgcaagtggatatttggatagcttggaggatttcgttggaagcgggagttcaaataaaaggtagacagcagcattctcagaaatttctttctgatgtctgcattcaactcatagagttgaagattccctttcatagagcaggtttgaaacactctttctggagtatctggatgtggacatttggagcgctttgatgcctacagtgaaaaagtaaatatcttcccagaaaaacgagacagaaggattctcagaaacaagtttgtgatgtgtgtactcagctaacagagtggaacctttctttttacagagcagctttgaaactctatttttgtggattctgcaaatggatatttagattgctttaatgatatcgttggaaaagggaatatcgtcatacaaaatctggacagaagcattctcacaaacttctttgtgatgtgtgtcctcagctaacagagtggaacctctcttttgatgcagcagtttggaaacactctttttgtagaaactgtaagtggatatttggatagctctaatgatttcgttggaaacgggaatatcatcatctaaaatctagacagaagcactattagaaactacttggtgatatctgcattcaagtcacagagtagaacattcccttacttcgagcacgtttgaaacactcttttggaagaatctggaagtggacatttggagcgctttgatgcctttggtgaaaaggaaacgtcttccaataaaagccagacagaagcattctcagaaacttcttcgtgatgtgtgtactcaactaaaagagttgaacctttctattgatagcgcagttttgaaacactctttttgtggattctgcaagtggatatttggattgctttgaggatttcgttggaagcgggaattcatataaaaactagacagcagcattcccagaaatttctttcggatatttccattcaactcattgagatgaacatcgcctttcatagagcaggtttgaaacactctttttgtagtttgtggaagtggacatttcgatcgccttgatgcctacagtgaaaaaggaaatatcttcccataaaaaatagacagaagcattctcagaaacttgttggtgatatgtgtcctcaactaacagagttgaactttgccattgatagagagcagttttgaaacactctttttgtggaatctgcaagtggatatttggatagcttggaggatttcgttggaagcgggaattcaaataaaaggtagacagcaggattctgagaaacaagtttgtgatgtgtgtactcagctaacagagtggaacctctcttttgatgcagcagtttggaaacactctttttgtagaaactgtaagtggatatttggatagctctaatgatttcgttggaaacgggaatatcatcatctaaaatctagacagaagccctctcagaaactactttgtgatatctgcattcaagtcacagagttgaacattcgctttcttagagtacgttggaaacactctttttgtagtgtctggaagtggacatttggagcgctttgatgcctttggtgaaaaagggaatgtcttcccataaaaactagacagaagcattctcagaaacttgtttgtgatgtgtgtacccagccaaaggagttgaacatttctattgatagagcagttttgaaacactctttttgtggaaaatgcaggtggatatttggatagcttggaggatttccgttggaagcgggaattcaaataaaaggtagacagcggattctgagaaacaagtttgtgatgtgtgtactcagctaacagagtggaacctttctttttacagagcagctttgaaactctatttttgtggattctgcaaatggatatttagattgctttaacgatatcgttggaaaagggaatatcgtcatacaaaatctagacagaagcattctcacaaacttctttgtgatgtgtgtcctcaactaacagagttgaacctttcttttgatgcagcagtttggaaacactctttttgtagaaactgtaagtggatatttggatagctctaacgatttcgttggaaacgggcatatcatcatctaaaatctagacagaagcactattagaaactacttggtgatatctgcattcaagtcacagagttgaacattcccttactttgagcacgtttgaaacactcttttggaagaatctggaagtggacatttggagcactgtgatgcctttggtgaaaaggaaacgtcttccaataaaagccagacagaagcattctcagaaacttgttcgtgatgtgtgtactcaactaaaagagttgaacctttctattgatagagcagttttgaaacactctttttgtggattctgcaagtggatatttggattgctttgaggatttcgttggaagcgggaattcgtataaacactagacagcagcattcccagaaatttctttcggatatttccattcaactcatagagatgaacatggcctttcatagagcaggtttgaaacactctttttgtagtttgtggaagtggacatttcgatcgccttgacgcctacgctgaaaaaggaaatatcttcccatacaaaatagacagaagcattctcagaaacttgttggtgatatgtgtcctcaactaacagagttgaactttgccattgatagagagcagttttgaaacactctttttgtggaatctgcaagtggatatttggatagcttggcaggatttcgttggaagcgggaattcaaataaaaggtagacagcagcattctcagaaattactttctgatgtctgcattcaactcgtagagttgaggattccctttcatagagcaggtttgaaacactctttctgtagtatctggatgtggacatttggagcgctttgatacctacagtgaaaaagtaaatatcttcccataaaaactagacagaaggattctcagaaacaagtttgtgatgtgtgtactcagctaacagagtggatcctttctttttacagagcagctttgaaactctatttctgtggattctgcaaattgatatttgggttgatttaacgacatcgttggaaaagggaatatcttcatacaaaatctagacagaagccctctcagaaactactttgtgatatctgcactcaagtcacagagttgaacattcgctttcttagagcacgttggaaacactctttttgtagtgtctggaagtggacatttggagcgctttgatgcctttggtgaaaaagggaatgtcttcccataaaaactagacagaaagcattctcagaaacttgtttgtgatgtgtgtacccagctaaaggagttgaacatttctattgatagagcagttttgaaacactctttttgtggaaaatgcaagtggatatttggatagcttggaggatttcgttggaagcgggaattcaaataaaaggtagacagagcattctcagaaatttctttctgatgtctgcattcaactcatagagttgaagattccctttcatagagcaggtttgaaacactctttctggagtatctggatgtggacatttggagcactttgatgcctacggtgaaaaagtaaatatcttcccataaaaacgagacagaaggattctcagaaacaagtttgtgatgtgtgtactcagctaacagagtggaacctttctttttacagagcagctttgaaactctatttttgtggattctgcaaatggatatttagattgctttaatgatatcgctggaaaagggaatatggtcatacaaaatctagacagaagcattctcacaaacttctttgtgatgtgtgtcctcaactaacagagttgaacctttcttttgatgcagcaatttggaaacacccttttggtagaaactgtaactggatatttggatagctctaacgatttcgttggaaacgggaatatcatcatctaaaatctagacagaagcactattagaaactacttggtgatatctgcattcaagacacagagttgaacattcccttactttgagcacgtttgaaacactcttttggaagaatctggaagtggacatttggagcgctttgatgcctttggtgaaaaggaaacgtcttccaataaaagacagacagaagcattctcagaaacttgtttgtgatgtgtgtactcaactaaaagagttgaacctttctattgatagagcagttttgaaacactctttttgtggattctgcaagtggatatttggattgctttgaggatttcgttggaagcgggaattcgtataaaaactagacagcagcattcccagaaatttctttcggatatttccatttgactcatagagatgaacatggcctttcatagagcaggtttgaaacactctttttgtagtttgtggaagtggacatttcgatcgccttgacgcctacggtgaaaaaggaaatatcttcccataaaaaatagacagaagcattctcagaaacttgttggtgatatgtgtcctcaactaacagagttgaactttgccattgatagagagcagttttgaaacactctttttgtggaatctgcaagtggatatttggatagcttggaggatttcgttggaagcgggaattcaaataaaaggtagacagcagcattctcagaaatttctttctgatgtctgcattcaactcatagagttgaagattccctttcatagagcaggtttgaaacactctttctggagtatctggatgtggacatttggagagctttgatgcctactgtgaaaaagtaaatatcttcccataaaaacgagacagaaggattctgagaaacaagtttgtgatgtgtgtactcagctaacagagtggaacctctcttttgatgcagcagtttggaaacactctttttgtagaaactgtaagtggatatttggatagctctaatgatttcgttggaaacgggaatatcatcatctaaaatctagacagaagcactctcagaaactactttgtgatatctgcattcaagtcacagagttgaacattccctttcttagagcacgtttgaaacactctttttgtagtgtctggaagtggacatttggagcgctttgattcctttggtgaaaaagggaatgtctacccataaaaactagacagaagcattctcagaaacttgttggtgatatgtgtcctcaactaacagagttgaactttgccattgatagagagcagttttgaaacactctttttgtggaatctgcaagtggatatttggatagcttggaggatttcgttgtaagcgggaattcaaataaaaggtagacagcagcattctcagaaatttctttctgatgtctgcattcaactcatagagttgaagattccctttcatagagcaggtttgaaacaccctttctggagtatctggatgtggacatttggagcgctttgatgcctacggtgaaaaagtaaatatcttcccataaaaacgagacagaaggattctcagaaacaagtttgtgatgtgtgtactcagctaacagagtggaacctttctttttacagagcagctttgaaactctatttttgtggattctgcaaatggatatttagattgctttaacgatatcgttggaaaagggaatatcgtcatacaaaatctagacagaagcattctcacaaacttctttgtgatgtgtgtcctcaactaacagagttgaacctttcttttgatgcagcagtttggaaacactctttttgtagaaactgtaagtggatatttggatagctctaacgatttcgttggaaacgggaatatcatcatctaaaatctagacataagcactattagaaactacttggtgatatctgcattcaagtcacagagttgaacattcccttacttcgaccacgtttgaaacactcttttggaagaatctggaagtggacatttggagcgctttgatgcctttggtgaaaaggaaacgtcttccaataaaagccagagagaagcattctcagaaacttggtcgtgatgtgtgtactcaactaaaagagttgaacctttctattgatagagcagttttgaaacactctttttgtggattctgcaagtggatatttggattgctttgaggatttcgttgcaagcgggaattcgtataaacactagacagcagcattcccagaaatttctttcggatatttccattcgactcatagagatgaacatggcctttcatagagcaggtttgaaacactctttttgtagtttgtggaagtggacatttcgattgccttgacgcctacggtgaaaaaggaaatatcttcccataaaaaatagacagaagcattctcagaaacttgttggtgatatgtgtcctcaactaacagagttgaactttgccattgatagagagcagttttgaaacactctttttgtggaatctgcaagtggatatttggatagcttggaggatttcgttggaagcgggaattcaaataaaaggtagacagcagcattctcagaaatttctttctgatgtctgcattcaactcatagagttgaagattccctttcatagagcaggtttgaaacactcgttctggagtatctggatgtggacatttggagcgctttgatgcctacggtgaaaaagtaaatatcttcccataaaaacgagacagaaggattctgagaaacaagtttgtgatgtgtgtactcagctaacagagtggaacctctcttttgatgcagcagtttggaaacactctttttgtagaaactgtaagtggatatttggatagctctaatgatttcgttggaaacgggaatatcatcatctaaaatctagacagaaggactctcaagaaactactttttgatatctgcattcaagtcacagagttgaacattcgctttcttagagcacttttgaaacactctatttgtcgtatctggaagtggacatttggagctctttgatgcctttggtgaaaaaggaaatgtcttcccataaaaactagacagaagcattctcagaaacttgtttgtgatgtgtgcacccagctaaaggagttgaacatttattgatagagcagttttgaagcactctttttgtggaaaatgcaagtggatatttggatagcttggaggatttcgttggaagcgggagttcaaataaaaggtagacagcagcattctcagaaatttctttctgatgtctgcattcaactcatagagttgaagattccctttcatagagtaggtttgaaacactcgttccggagtatctggatgtggacatttggagcgctttgatgcctacggtggaaaagtaaatatcttcccataaaaacgagacagaaggattctgagtaaacaagtttgtgatgtgtgtactcagctaacagagtggaacctttctttttacagagcagctttgaaactctatttttgtggattctgcaaatggatatttagattgctttaatgatatcgctggaaaagggaatatggtcatacaaaatctagacagaagcattctcacaaacttctttgtgatgtgtgtcctcaactaacagagttgaacctttcttttgatgcagcagtttggaaacactctttttgtagaaactgtaactggatatttggatagctctaacgatttcgttggaaacgggaatatcatcatctaaaatctagacagaagcactattagaaactacttggtgatatctgcattcaagtcacagagttgaacattcccttactttgagcacgtttgaaacactcttttggaagaatctggaagtggacatttggagcgctttgatgcctttggtgaaaaggaaacgtcttccaataaaagccagacagaagcattctcagaaacttgtttgtgatgtgtgtactcaactaaaagagttgaacctttccattgatagagcagttttgaaacactctttttgtggattctgcaagtggatatttggattgctttgaggatttcgttggaagcgggaattcgtataaaaactagacagcagcattcccagaaatttctttcagatatttccattcaactcatagagatgaacatggcctttcatagagcaggtttgaaacactctttttgtagtttgtggaagtggacatttcgatcgccttgacgcctacggtgaaaaaggaaatatcttcccataaaaaatagacagaagcattctcagaaacttgttggtgatatgtgtcctcaactaacagagttgaactttgccattgatagagagcagttttgaaacactctttttgtggaatctgcaagtggatatttggatagcttggaggatttcgttggaagcgggaattcaaataaaaggtagacagcagcattctcagaaatttctttctgatctctgcattcaactcatagagttgaacattccctttcatagggcaggtttgaaatactctttctgtagtatctggatgaggacatttggagcgctttgatgcctacggtgaaaaagtaaatatcttcccataaaaacgagacagaaggattctgagaaacaagtttgtgatgtgtgtactcagctaacagagtggaacctctcttttgatgcagcagtttggaaacactctttttgcagaaactgtaagtggatatttggatagctctaatgatttcgttggaaacgggaatatcatcatctaaaatctaggcagaaagccctctcagaaactactttgtgatatctgcattcaagtcacagagttgaacattcgctttcttagagcacgtttgaaacactctttttgtagtgtctggaagtggacatttggagcgctttgatgcctttggtgaaaaagggaacgtcttcccataaaaactagacagaagcattctcagaaacttgtttgtgatgtgtgtacccagctaaaggagttgaacatttctattgatagagcagttttgaaacactctttttgtggaaaatgcaagtggatatttggatagcttggaggatttcgttggaagcgggaattcaaataaaaggtagacagcagcattctcagaaatttctttctgatgtctgcattcaactcatagagttgaagattccctttcatagagcaggtttgaaacactcgttctggagtgtctggatgtggacatttggagcgctttgatgcctatggtggaaaagtaaatatcttcccataaaaacgagacagaaggattctcagaaacaagtttgtgatgtgtgtactcagctaccagagtggaacctttctttttacagagcagctttgaaactctatttttgtggattctgcaaattgatatttagattgctttaacgatatcgttggaaaagggaatatcgtcatacaaaatctagacagaagcattctcacaaacttctttgtgacgtgtgtcctcaactaacagagttgaacctttcttttgatgcagcagtttggaaacactgtttttgtagcaactgtaagtggatatttggatagctctaacgatttcgttggaaacgggaatatcatcatctaaaatctagacagaagcactattagaaactacttggtgatatctgcattcaagtcacagagttgaacattcccttactttgagcacgtttgaaacactcttttggaagaatctggaagtggacatttggagcgctttgatgcctttggtgaaaaggaaacgtcttccaataaaagccagacagaagcattctcagaaacttgttcgtgatgtgtgtactcaactaaaagagttgaacctttctattgatagagcagtttagaaacactctttttgtggattctgcaagtggatatttggattgctttgaggatttcgttggaagcgggaattcgtataaacactagacagcagcattcccagaaatttctttcggatatttccattcgactcatagagatgaacatggcctttcatagagcaggtttgaaacactctttttgtagtttgtggaagtggacatttcgatcgccttgacgcctacggtgaaaaaggaaatatcttcccataaaaaatagacagaagcattctcagaaacttgttggtgatatgtgtcctcaactaacagagttgaactttgccattgatagagagcagttttgaaacactctttttgtggaatctgcaagtggatatttggatagcttggaggatttcgttggaatcgggaattcaaataaaaggtagacagcagcattctcagaaatttctttgtgatgtttgcattcaactcatagagttgaacattccctttaatagagtaggtttgaaacactctttctgtactatctggatgtggacatttggagcgctttgacgcctacggtgaaaaaggaaatgtcttcccataaaaaattgaagaaggattctcagaaacaggtttgtgatgtgtgtactcagctaacagagtggaacctctcttttgatgcagcagtttggaaacactctttttgtagaaactgtaagtggatatttggatagctctaatgatttcgttggaaacgggaatatcatcatctaaaatctagacagaagcactctcagaaactactttgtgatatctgcattcaagtcacagagttgaacattcgctttcttagagcacttttgaaacaccctttttgtcgtatctggaagtggacatttggagctctttgatgcctttggtgaaaaaggagatgtcttcccataaaaactagacagaagcattctcagaaacttgtttgtgatgtgtgtacccagccaaaggagttgaacatttctattgatagagcagttttgaaacactctttttgtggaaaatgcaggtggatatttggatagcttggaggatttcgttggaagcgggaattcaaataaaagttagacagcagcattctcagaaatttctttctgatgtctgcattcaactcatagagttgaacattccctttcataggacaggtttgaaatactctttctgtagtatctggatgtggacatttggagcgctttgatgcctacagtgaaaaagtaaatatcttcccataaaaacgagacagaaggattctcagaaacaagtttgtgatgtgtgtactcagctaacagagtggaacctttctttttacagagcagctttgaaactctatttttgtggattctgcaaattgatatttagattgctttaacgatatcgttggaaaagggaatatcgtcatacaaaatctggacagaagcattctcacaaacagctttgtgaagtgtgtcctcaactaacagagttgaacctttcttttgatgcagcagtttggaaacacccttttggtagaaactgtaagtggatatttggatagctctaacgatttcgttggaaacgggaataccatcatctaaaatctagacagaagcactattagaaactacttggtgatatctgcattcaagtcacagagttgaacattcccttacttcgagcacgtttgaaacactcttttggaagaatctggaagtggacatttggagcgctttgatgcctttggtgaaaaggaaacgtcttccaataaaagccagacagaagcattctcagaaacttgtttgagatgtgtgtactcaactaaaagagttgaacctttctattgatagagcagttttgaaacactctttttgtggattctgcaagtggatatttggattgctttgaggatttcgttggaagcgggaattcgtataacaactagacagcagcattcccagaaatttctttcggatatttccattcaactcatagagatgaacatggcctttcatagagcaggtttgaaacactctttttgtagtttgtggaagtggacatttcgatcgccttgacgcctacggtgaaaaaggaaatatcttccccataaaaaatagacagaagcattctcagaaacttgttggtgatatgtgtcctcaactaacagagttgaactttgccattgatagagagcagttttgaaacactctttttgtggagtttgcaagtggatatttggatagcttggaggatttcgttggaagcgggaattcaaattaaaggtagacagcagcattctcagaaatttctttctgatgtctgcattcaactcatagagttgaacattccctttcatagagcaggtttgaaacactctttctggagtatctggatgtggacatttggagcgctttgatgcctacggtgaaaaagtaaatatcttcccataaaaacgagacagaaggattctgagaaacaagtttgtgatgtgtgtactcagctaacagagtggaacctctcttttgatgcagcagtttggaaaaactctttttgtagaaactgtaagtggatatttggatagctctaatgatttcgttggaaacgggaatatcatcatctaaatctagacagaagcactctcagaaactactttgtgatatctgcattcaagtcacagagttgaacattcgctttcttagagcacgtttgaaacactctttttgtagtgtctggaagtggacatttggagcgctttgattcctttggtgaaaaagggaatgtctacccataaaaactagacagaagcattctcagaaacttgtttgtgatgtgtgtacccagccaaaggagttgaacatttctattgatagagcagttttgaaacactcttgttgtggaaaatgcaggtggatatttggatagcttggaggatttcgttggaagcgggaaatcaaataaaaggtagacagcagcattctcagaaatttctttctgatgtctgcattcaactcatagagttgaagattccctttcatagagcaggtttgaaacactcgttctggagtatctggatgtggacatttggagcgctttgatgcctacggtggaaaagtaaatatcttcccataaaaacgagacagaaaggattctcagaaacaagtttgtgatgtgtgtactcagctaacagagtggaacctttctttttacacagcagctttgaaactctatttttgtggattctgcaaattgatatttagattgttttaacgatatcgttggaaaagggaataccgtcatacaaaatctagacagaagcattctcacaaacttctttgtgatgtgtgtcctcaactaacagagttgaacttttcttttgatgcagcagtttggaaacactctttttgtagaaactgtaagtggatatttggatagctctaacgatttcgttggaaacgggaatatcatcatctaaaatctagacagaagcactattagaaactactttgtgatatctgcattcaagtcacagagttgaacattcgctttcttagagcacgtttgaaacactcttttggaagaatctggaagtggacatttggagcgctttgatgcctttggtgaaaaggaaacgtcttccaataaaagccagacagaagcattctcagaaacttgttcgtgatgtgtgtactcaactaaaagagttgaacctttctattgatggagcagttttgaaacactctttttgtggattctgcaagtggatatgtggattgctttgaggatttcgttggaagcgggaattcgtataacaactagacagcagcattcccagaaatttctttcggatatttccattcaactcatagagatgaacatggcctttcatagagcaggtttgaaacactctttttgtagtttgtggaagtggacatttcgatcgccttgacgcctaaggtgaaaaaggaaatatcttcccataaaaaatagacagaagcattctcagaaacttgttggtgatatgtgtcctcaactaacagagttgaactttgccattgatagagagcagttttgaaacactctttttgtggaatctgcaagtggatatttggatagcttggaggatttcgttggaagcgggaattcaaataaaaggtagacagcagcattctcagaaatttctttctgatgtctgcattcaactcatagagttgaacattccctttcatagagcaggtttgaaacactctttctggagtttctggatgtggacatttggagcgctttgatgcctacggtgaaaaagtaaatatcttcccataaaaacgagacagaaggaatctgagaaacaagtttgtgatgtgtgtactcagctaacagagtggaacctctcttttgatgcagcagtttggcaacactctttttgtagaaactgtaagtggatatttggatagctctaatgatttcgttggaaacgggaatatcatcatctaaaatctagacagaagccctctcagaaactactttgtgatatctgcattcaagtcacagagttgaacattcgctttcttagagcacgtttgaaacactctttttgtagtgtctggaagtggacatttggagcgctttgatgcctttggtgaaaaagggaacgtcttcccataaaaactagacagaagcattctcagaaagttgtttgtgatgtgtgtacccagctaaaggagttgaacatttctattgatagagtagttttgaaacactctttttgtggaaaatgcaagtggatatttggatagcttggaggatttcgttggaagcgggaattcaaataaaaggtagacagcagcattctcagaaatttctttctgatgtctgcattcaactcatagagttgaagattccctttcatagagcaggtttgaaacactctttctggagtatctggatgtgtacatttggagcgctttgatgcctacggtgaaaaagtaaatatcttcccagaaaaacgagacagacaaggattctgagaaacaagtttgtgatgtgtgtactcagctaacagagtggaacctttctttttacagagcagctttgaaactctatttttgtggattctgcaaatggatatttagattgctttaatgatatcgttggaaaagggaatatcgtcatacaaaatctagacagaagcattctcacaaacttctttgtgatgtgtgtcctcaactaacagagttgaacctttcttttgatgcagcaatttggaaacacccttttggtagaaactgtaactggatatttgcttagctctaacgatttcgttggaaacgggaatatcatcatctaaaatctagacagaagcactattagaaactacttggtgatatctgcattcaagtcacatagtagaacattcccttacttcgagcacgtttgaaacactcttttggaagaatctggaagtggacatttggagcgctttgatgcctttggtgaaaaggaaacgtcttccaataaaagccagacagaagcattctcagaaacttgttcgtgatgtgtgtactcaactaaaagagttgaacctttctattgatagagcagttttgaaaccctctttttgtggattctgcaagtggatatttggattgctttgaggatttcgttggaagcgggaattcgtataaacactagacagcagcattcccagaaatttctttcggatatttccattcaactcatagagatgaacatggcctttcatattgaaacactctttttgtagtttgtggaagtggacatttcgatcgccttgacgcctacggtgaaaaaggaaatatcttcccataaaaaatagacagaagcattctcagaaacttgttggtgatatgtgtcctcaactaacagagttgaactttgccattgatagagagcagttatgaaacactctttttgtggaatctgcaagtggatatttggatagcttggaggatttcgttggaagcgggaattcaaataaaaggtagacagcagcattctcagaaatttctttctgatgtctgcattcaactcatagagttgaacattccctttcatagagcaggtttgaaacactctttctggagtatctggatgtggacatttggagcgctttgatgcctacggtgaaaaagtaaatatcttcccataaaaacgagacagaaggattctgagaaacaagtttgtgatgtgtgtactcagctaacagagtggaacctctcttttcatgcagcagtttggaaacactctttttgtagaaactgtaagtggatatttggatagctctaatgatttcgttggaaacgggaatatcatcatctaaaatctagacagaagccctctcagcaaactactttgtgatatctgcattcaagtcacagagttgaacattcgctttcttagagcacgttggaaacactctttttgtagtgtctggaagtggacatttggagcgctttgatgcctttggtgaaaaagggaatgtcttcccataaaaactagacagaagcattctcagaaacttgtttgtgatgtgtgtacccagctaaaggagttgaacatttctattgatagagcagttttgaaacactctttttgtggaaaatgcaagtggatatttgcgtagcttggaggatttcgttggaagcgggagttcaaataaaaggtagacagcagcattctcagaaatttctttctgatgtctgcattcaactcatagagttgaagattccctttcatagagcaggtttgaaacactcgttctggagtatctggatgtggacatttggagcgctttgatgcctacggtggaaaagtaaatatcttcccataaaaacgagacagaaggattctcagaaacaagtttgtgatgtgtgtactcagctaacagagtggaacctttctttttacagagcaggtttgaaactctatttttgtggattctgcaaattgatatttagattgctttaacgatatcgttggaaaagggaatatcgtcatacaaaatctagacagaagcattctcacaaacttctttgtgatgtgtgtcctcaactaacagagttgaacctttcttttgatgcagcaatttggaaacacccttttggtagaaactgtaactggatatttggatagctctaacgatttcgttggaaacgggaatatcatcatctaaaatgtagacagaagcactattagaaactacttggtgatatctgcattcaagacacagagtagaacattcccttacttcgagcacgtttgaaacactcttttggaagaatctggaagtggacatttggagcgctttgatgcctttggtgaaaaggaaacgtcttccaataaaagccagacagaagcattctcagaaacttgtttgtgatgtgtgtactcaactaaatgtgttgaacctttccattgatagagcagttttgaaacactctttttgtggattctgcaagtggatatttggattgctttgaggatttcgttggaagcgggaattcgtataaacactagacagcagcattcccagcaaatttctttcggatatttccattcaactcatagagatgaacatggcctttcatagagcaggtttgaaacactctttttgtagtttgtggaagtggacatttcgatcgccttgacgcctacggtgaaaaaggaaatatcttcccataaaaaatagacagaagcattctcagaaacttgttggtgatatgtgtcctcaactaacagagttgaactttgccattgatagagagcagttttgaaacactctttttgtggaatctgcaagtggatatttggatagcttggaggatttcgttggaagcgggaattcaaataaaaggtagacagcagcattctcagaaatttctttctgatgtctgcattcaactcatagagttgaagattccctttcatagagcaggtttgaaacactctttctggagtatctggatgtggacatttggagcgcttggatgcctttggtgaaaaagggaacgtcttcccataaaaactagacagaaggattctgagaaacaagtttgtgatgtgtgtactcagctaacagagtggaacctctcttttgatgcagcagtttggaaacactctttttgtagaaactgtaagtggatatttggatagctctaatgatttcgttggaaacgggaatatcatcatctaaaatctagacagaagccctctcagaaactactttgtgatatctgcattcaagtcacagagttgaacattcgctttctaagagcacgtttcaaacactctttctgtagtgtctggaagtggacatttggagcgctttgatgcctttggtgaaaaagggaacgtcttcccataaaaactagacagaagcattctcagaaacttgtttgtgatgtgtgtacccagccaaaggagttgaacatttctattgatagagcagttttgaaacactctttttgtggaaaatgcaggtggatatttggatagcttggaggatttcgttggaagcgggaattcaaataaaaggtagacagcagcattctcagaaatttctttctgatgtctgcattcaactcatagagttgaagattccctttcctagagcaggtttgaaacactctttctggagtatctggatgtggacatttggagcgctttgatgcctacggtgaaaaagtaaatatcttcccataaaaacgagacagaaggattctgagaaacaagtttgtgatgtgtgtactcagctaacggagtggaacctttctttttacagagcaggtttgaaactctatttttgtggattctgcaaattgatatttagattgctttaacgatatcattggaaaagggaatatcgtcatacaaaatctagacagaagcattctcacaaacttctttgtgatgtgtgtcctcaactaacagagttgaacctttcttttgatgcagcagtttggaaacacccttttggtagaaactgtaactggatatttggatagctctaacgatttcgttggaaacgggaatatcatcatctaaaatctagagagaagcactattagacactgcttggtgatatctgcattcaagtcacagagttgaacattcccttactttgagcacgtttgaaacactcttttggaagaatctggaagtggacatttggagcgctttgatgccttggtgaaaaggaaacgtcttccaataaaagccagacagaagcattctcagaaacttgtttgtgatgtgtgtactcaactaaaagagttgaacctttctattgatagagcagttttgaaacactctttttgtggattctgcaagtggatatttggattgctttgaggatttcgttggaagcgggaattcgtataaaaactagacagcagcattcccagaaatttctttcggatatttccattcaactcatagagatgaacatggcctttcatagagcaggtttgaaacactctttttgtagtttgtggaagtggacattacgatcgccttgacgcctacggtgaaaaaggaaatatcttcccataaaaaatagacagaagcatactcagaaacttgttggtgatatgtgtcctcaactaacagagttgaactttgccattgatagagagcagttttgaaacactctttttgtggaatctgcaagtggatatttggatagcttggaggatttcgttggaagcgggaattcaaataaaaggtagacagcagcattctcagaaatttctttgtgatgtttgcattcaactcatagagttgaacattccctttcatagagcaggtttgaaacactctttctgtactatctagatgtggacatttggaacgctttgatgcctacggtgaaaaagtaaatatcttcccataaaaactagacagaaggattctcagaaagaagtttgtgatgtgtctactcagctaacagagtggaacctttctttttacagagcagctttgaaactctatttttgtggattctgcaaattgatatttagattgctttaacgatatcgttggaaaagggaatatcgtcatacaaaatctagacagaagcattctcacaaacttctttgtgatgtgtgtcctcaactaacagagttgaacctttattttgatgcagcagtttggaaacactctttttgtagaaactgtaagtggatatttggatagctctaacgatttcgttggaaacgggaatatcatcatctaaaatctagacagaagcattctcagaaacttgtttgtgatgtgtgtacccagctaatggagttgaacatttctattgatagagcagttttgaaacactctttttgtggaaaatgcaagttgatatttggatagcttggaggatttcgttggaagcgggaattcaaataaaaggtagacagcaaggattctcagaaacaagtttgtgatgtgtgtactcagctaacagagtggaacctttctttttacagagcagctttgaaactctatttttgtggattctgcaaattgatatttagattgctttaacgatatcgttggaaaagggaatatcatcatacaaaatctagacagaagcattctcacaaacttctttgtgatgtgtgtcctcaactaacagagttgaacctttcttttgatgcagcaatttggaaacacccttttggtagaaactgtaactggatatttggatagctctaacgatttcgttggaaacgggaatatcatcatctaaaatctagacagaagcactattagaaactacttggtgatatctgcattcaagtcacagagttgaacattcccttactttgagcacgtttcaaacactcttttggaagaatctggaagtggacatttggagcgctttgatgcctttggtgaaaaggaaacgtcttccaataaaagccagacagaagcattctcagaaacttgtttgtgatgtgtgtactcaactaaaagagttgaacctttctattgatagagcagttttgaaacactctttttgtggattctgcaagtggatatttggattgctttgaggatttcgttggaagcgggaattcgtataaaaactagacagcagcattctcagaaacttgtttgtgatgtgtgtactcaactaaaagagttgaacctttctatgatagagcagttttgaaacactctttttgtggaatctgcaagtggatatttggattgctttgagcatttcgttggaagcgggatttcatataaaaactagacagcagcattctcagaaacttgttggtgatatgtgtcctcaactaacagagttgaactttgccattgatagagagcagttttgaaacactctttttgtggaatctgcaagtggatatttggatagcttggaggatttcgttggaagcgggaattcaaataaaaaggtagacagcaggattctcagaaacaagtttgtgatgtgtgtactcagctaacagagtggaacctctcttttgaatgcagcagtttggaaacactctttttgtagaaactgtaagtggatatttggaaagctctaatgatttcattggaaacgggaatatcatcatgtaaaatctagacagaaagccctctcagaaactactttgtgatatctgcattcaagtcacagagttgaacattcgctttcttagagcacgttggaaacactctttttgtagtgtctggaagtggacatttggagcgctttgatgcctttggtgaaaaagggaatgtcttcccataaaaactagacagagcattctcagaaacttgtttgtgatgtgtgtacccagccaaaggagttgaacatttctattgatagagcagttttgaaacactcttgttgtggataatgcaggtggatatttggatagcttggaggatttcgttggaagcgggaattcaaataaaaggtagacagcagcattctcagaaatttctttctgatgtctgcattcaactcatagagttgaagattccctttcatagagcaggtttgaaacactcgttctggagtatctggatgtggacatttggagcgctttgatgcctacggtggaaaagtaaatatcttcccataaaaacgagacagaaggattctcagaaacaagtttgtgatgtgtgtactcagctaacagagtggaacctttctttttacagagcagctttgaaactctatttttgtggattctgcaaattgatatttagattgctttaacgatatcgttggaaaagggaataccgtcatacaaaatctagacagaagcattctcacaaacttctttgtgatgtgtgtcctcaactaacagagttgaacctttcttttgatgcagcaatttggaagcacccttttggtagaaactgtaactagatatttggatagctctaacgatttcgttggaaacgggaatatcatcatctaaaatgtagacagaagcactattagaaactacttggtgatatctgcattcaagtcacagagttgaacattcccttactttgagcacgtttgaaacactcttttggaagaatctggaagtggacatttggagcgctttgatgcctttggtgaaaaggaaacgtcttccaataaaagccagacagagcattctcagaaacttgtttgtgatgtgtgtactcaactaaaagagttgaacctttctattgatagagcagttttgaaacactctttttgtggattctgcaagtggatatttggattgctttgaggatttcgttggaagcgggaattcgtataaaaactagacagcagcattcccagaaatttctttcggatatttccattcaactcatagagaagaacatggcctttcatagagcaggtttgaaacactctttttgtagtttgtggaagtggacatttcgatcgccttgacgcctacggtgaaaaaggaaatatcttcccataaaaaatagacagaagcattctcagaaacttgttggtgatatgtgtcctcaactaacagagttgaactttgccattgatagagagcagttttgaaacactctttttgtggaatctgcaagtggatatttggatagcttggaggatttcgttggaagcgggaattcaaataaaaggtagacagcagcattctcagaaatttctttctgatgtctgcattcaactcatagagttgaagattccctttcatagagcaggtttgaaacactctttctggagtatctggatgtggacatttggagcgctttgaggcctacggtgaaaaagtaaatatcttccaataaaaacgagagagaaggattctgagaaacaagtttgtgatgtgtgtactcagctaacagagtggaacctctcttttgatgcagcagtttggaaacactctttttgtagaaactgtaagtggatattttgatagctctaatgatttcgttggaaacgggaatatcatcatctaaaatctagacagaagcactctcagaaactactttgtgatatctgcattgaagtcacagagttgaacattcgctttcttagagcacttttgaaacactctttttgtagtatctggaagtggacatttggagctctttgatgcctttggtgaaaaaggaaatgtcttcccataaaaactagacagaagcattctcagaaacttgtttgtgatgtgtgcacccagctaaaggagttgaacatttattgatagagcagttttgaagcactctttttgtggaaaatgcaagtggatatatggatagcttggaggatttcgttggaagcgggaattcaaataaaaggtagacagcagcattctcagaaatttctttctgatgtctgcattcaactcatagagttgaagattccctttcatagagcaggtttgaaacactctttctggagtatctggatgtggacatttggagcgctttgatgcttacggtgaaaaagtaaatatgttcccataaaaacgacacagaaggattctcagaaacaagtttgtgatgtgtgtactcagctaacagagtggaacctttctttttacagagcagcttggaaactctatttttgtggattctgcaaattgatatttagattgctttaacaatatcgttggaaaagggaatatcgtcatacaaaatctagacagaagcattctcacaaacatctttgtgatgtgtgtcctcaactaacagagttgaacctttcttttgatgcagcagtttggaaacacccttttggtagaaactgtaactggatatttggatagctctaacgatttcgttggaaacgggaatatcatcatctaaaatctagacagaagcactattagaaactacttggtgatatctgcattcaagtcacagagttgaacattcccttactttgagcacgtttcaaacactcttttggaagaatctggaagtggacatttggagcgctttgatgcctttggtgaaaaggaaacgtcttccaataaaagccagacagaagcattctcagaaacttgttcgtgatgtgtgtactcaactaaaagagttgaacctttctattgatagagcagttttgaaacactctttttgtggattctgcaagtggatatttggatttctttgaagatttcgttggaagcgggaattcgtataaacactagacagcagcattcccagaaatttctttcggatatttccattcgactcatagagatgaacatggcctttcatagagcaggtttgaaacactctttttgtagtttgtggaagtggacatttcgatcgccttgacgcctacggtgaaaaaggaaatatcttcccataaaaaatagacagaagcattctcagaaacttgttggtgatatgtgtcctcaactaacagagttgaactttgccattgatagagagcagttttgaaacactctttttcctgaatctgcaagtggatatttggatagtttggaggatttcgttggaagcgggaattcaaataaaaggtagacagcagcattctcagaaatttctttctgatctctgcattcaactcatagagttgaacattccgtttcatagggcaggtttgaaatactctttctgtagtatctggatgtggacatttggagcgctttgatgcctacggtgaaaaagtaaatatcttcccataaaaacgagacagaaggattctgagaaacaagtttgtgatgtgtgtactcagctaacagagtggaacctctcttttgatgcagcagtttggaaacactctttttgtagaaactgtaagtggatatttggatagctctaatgatttcgttggaaacgggaatatcatcatctaaaatctagacagaagccctctcagaaactactttgtgatatctgcattcaagtcacagagttgaacattcgctttcttagagcacgttggaaacactctttttgtagtgtctggaagtggacatttggagcgctttgatgcctttggtgaaaaagggaacgtcttcccataaaaactggacagaagcattctcagaaacttgtttgtgatgtgtgtacccagctaaaggagttgaacatttccattgatagagcagttttgaaacactctttttgtggaaaatgcaagtggatatttggatagcttggaggatttcgttggaagcgggaattcaaataaaaggtagacagcagcattctcagaaatttctttctgatgtctgcatttaactcatagagttgaagattccctttcatagagcaggtttgaaacactctttctggagtatctggatgtggacatttggagcgctttgatgcctacggtgaaaaagtaaatatcttcccataaaaacgagacagaaggattctcagaaagaagtttgtgatgtgtgtactcagctaacagagtggaacctttccttttacagagcagctttgaaactctatttttgtggattctgcaaattgatatttagattgctttaacgatatcgttggaaaagggaatatcgtcatacaaaatctagacagaagcattctcacaaacttctttgtgatgtgtgtcctcaactaacagagttgaacctttcttttgatgcagcaatttggaaacacccttttggtagaaactgtaactggatatttggatagctctaacgatttcattggaaacgggaatatcatcatctaaaatctagacagaagcactattagaaactacttggtgatatctgcattcaagtcacagagttgaacattcccttactttgagcacgtttcaaacactcttttggaagaatctggaagtggacatttggagcgctttgatgcctttggtgaaaaggaaacgtcttccaataaaagccagacagaagcattctcagaaacttgtttgtgatgtgtgtactcaactaaaagagttgaacctttctattgatagagcagttttgaaacactctttttgtggattctgcaagtggatatttggattgctttgaggatttcgttggaagcgggaattcgtataaaaactagacagcagcattcccagaaatttctttcggatatttccattcgactcatagagatgaacatggcctttcatagagcaggtttgaaacactctttttgtagtttgtggaagtggacatttcgatcgccttgacgcctacggtgaaaaaggaaatatcttcccataaataatagacagaagcattctcagaaacttgttggtgatatgtgtcctcaactaacagagttgaactttgccattgatagagagcagttttgaaacactctttttcctgaatctgcaagtggatatttggatagcttggaggatttcgttggaagcgggaattcaaataaaagtagacagcagcattctcagaaatttctttctgatctctgcattcaactcatagagttgaacattccctttcatagggcaggtttgaaatactctttctgtagtatctggatgtggacatttggagcgctttgatgcctacggtgaaaaagtaaatatcttcccataaaaacgagacagaaggattctgagaaacaagtttgtgatgtgtgtactcagctaacagagtggaacctctcttttgatgcagtagtttggaaacactctttttgtagaaactgtaagtggatatttggatagctctaatgatttcgttggaaacgggaatatcatcatctaaaatgctagacagaagcactctcagaaactactgtgtgatatctgcattcaagtcacagcagttgaacattcgctttcttagagcacgtttgaaacactctttttgtagtgtctggaagtggacatttggagcgctttgatgtctttggtgaaaaagggaatgtcttcccataaaaactagacagaagcattctcagaaacttatttgtgatgtgtgtacccagctaaaggagttgaacatttctattgatagagcagttttgaaacactctttttgtggaaaatgcaagtggatatttggatagcttggaggatttcgttggaagcgggaattcaaataaaaggtagacagcagcattctcagaaatttctttctgatgtctgcattcaactcatagagttgaagattccctttcatagagcaggtttgaaacactctttctggagtatctggatgtggacatttggagcgctttgatgcctacggtgaaaaagtaaatatcttcccataaaaacgagacagaaaggattctcagaaacaagtttgtgatgtgtgtactcagctaacagagtggaacctttctttttacagagcagctttgaaactctatttttgtggattctgcaaatggatatttagattgctttaatgatatcgctggaaaagggaatatggtcatacaaaatctagacagaagcattctcacaaacttctttgtgacgtgtgtcctcaactaacagagttgaacctttcttttgatgcagcagtttggaaacactgtttttgtagcaactgtaagtggatatttggatagctctaacgatttcgttggaaacgggaatatcatcatctaaaatctagacagaagcactattagaaactacttggtgatatctgcattcaagtcacagagttgaacattcccttactttgagcacgtttcaaacactcttttggaagaatctggaagtggacatttggagcgctttgatgcctttggtgaaaaggaaacgtcttccaataaaagccagacagaagcattctcagaaacttgttcgtgatgtgtgtactcaactaaaagagttgaccctttctattgatggagcagttttgaaacactctttttgtggattctgcaagtggatatgtggattgctttgaggatttcgttggaagcgggaattcgtataacaactagacagcagcattcccagaaatttctttcggatatttccattcaactcatagagatgaacatggcctttcatagagcaggtttgaaacactctttttgtagtttgtggaagtggacatttcgatcgccttgacgcctacggtgaaaaaggaaatatcttcccataaaaaatagacagaagcattctcagaaacttgttggtgatatgtgtcctcaactaacagagttgaactttgccattgataaagagcagttttgaaacactctttttgtggaatctgcaagtggatatttggatagcttggaggatttcgttggaagcgggaattcaaataaaaggtagacagcagcattctcacaaatttctttctgatctctgcattcaactcatagagttgaacattccctttcatagggcaggtttgaaatactctttctgtagtatctggatgtggacatttggagcgctttgatgcctacggtgaaaaagtaaatatcttcccataaaaacgagacagaaggattctcagaaacaagtttgtgatgtgtgtactcagctaacagagtggaacctctcttttgatgcagcagtttggaaacactctttttgtagaaaccgtaagtggatatttggatagctctaatgatttcgttggaaacgggaatatcatcatctaaaatctagacagaagccctctcagaaactactttgtgatatctgcattcaagtcacagagttgaacattcgctttcttagagcacgtttgaaacactctttttgtagtgtctggaagtggacatttggagcgctttgatgcctttggtgaaaaagggaatgtcttcccataaaaaatagacagaagcattctcagaaacttgtttgtgatgtgtgtacccagctaaaggagttgaacatttctattgatagagcagttttgaaacactcttgttgtggaaaatgcaggtggatatttggatagcttggaggatttcgttggaagcgggaattcaaataaaaggtagacagcagcattctcagaaatttctttctgatgtctgcattcaactcataagagttgaagattccctttcatagagcaggtttgaaacactctttctggagtatctggatgtggacatttggagggctttgatgcctacggtgaaaaagtaaatatcttcccataaaaacgagacagaaggattctgagaaacaagtttgtgatgtgtgtactcagctaacagagtggaacctttctttttacagagcagctttgaaactctatttttgtggattctgcaaatggatatttagattgctttaatgatatcgttggaaaagggaatatcgtcatacaaaatctagacagaagcattctcacaaacttctttgtgatgtgtgtcctcaactaacagagttgaacctttcttttgatgcagcaatttggaaacacccttttggtagaaactgtaactggatatttggatagctctaacgatttcgttggaaacgggaatatcatcatctaaaatctagacagaagcactattagaaactacttggtgatatctgcattcaagtcacagagtagaacattcccttacttcgagcacgtttgaaacactcttttggaagaatctggaagtggacatttggagcgctttgatgcctttggtgaaaaggaaacgtcttccaataaaagccagacagaagcattctcagaaacttgttcatgatgtgtgtactcaactaaaagagttgaacctttctattgatagagcagttttgaaacactctttttgtggattctgcaagtggatatttggattgctttgaggatttcgttggaagcgggaattcgtataaacactagacagcagcattcccagaaatttctttcggatatttccattcaactcaaagagatgaacatggcctttcatagagcaggtttgaaacactctttttgtagtttgtggaagtggacatttcgatcgccttgacgcctacggtgaaaaaggaaatatcttcccataaaaaatagacagaagcattctcagaaacttgttggtgatatgtgtcctcaactaacagcagttgaactttgccattgatagagagcagttttgaaacactctttttgtggaatctgcaagtggatatttggatagcttggaggatttcgttggaagcgggaattcaaataaaaggtagacagcagcattctcagaaatttctttctgatgtttgcattcaactcatagagttgaacattccctttcatagagcaggtttgaaacactctttctgtactatctggatgtggacatttggagcgctttgatgcctacggtgaaaaaggaaatgtcttcccataaaaaattgaagaaggattctcagaaacaagtttgtgatgtgtgtactcagctaacagagtggaacctctcttttgatgcagcagtttggaaacactctttttgtagaaactgtaagtggatatttggatagctctaatgatttcgttggaaacgggaatataatcatctaaaatctagacagaagccctctcagaaactactttgtgatatgtgcattcaagtcacagagttgaacattcgctttcttagagcacgtttgaaacactctttttgtagtgtctggaagtggacatttggagcgctttgatgcctttggtgaaaaaggggaacgtctacccataaaaactagacagaagcattctcagaaacttgtttgtgatgtgtgtacccagctaaaggagttgaacatttctattgatagagcagttttgaaacactctttttgtggaaaatgcaagtggatatttgcatagcttggaggatttcgttggaagcgggagttcaaataaaaggtagacagcagcattctcagaaatttctttctgatgtctgcattcaactcatagagttgaagattccctttcatagagcaggtttgaaacactctttctggagtatctggatgtggacatttggagcgctttgatgcctacggtgaaaaagtaaatatcttcccataaaaacgagacagaaggattctcagaaacaagtttgtgatgtgtgtactcagctaacagagtggaacctttctttttacagagcagctttgaaactctatttttgtggattctgcaaattgatatttagattgctttaacgatatcgttggaaaagggaatatggtcatacaaaatactagacagaaagcattctcacaaacttctttgtgacgtgtgtcctcaactaacagagttgaacctttcttttgatgcagcagtttggaaacactgtttttgtagcaactgtaagtggatatttggatagctctaacgatttcgttggaaacgggaatatcatcatctaaaatctagacagagcactattagaaactacttggtgatatctgcattcaagtcacagagttgaacattcccttactttgagcacgtttcaaacactcttttggaagaatctggaagtggacatttggagcgctttgatgcctttggtgaaaaggaaacgtcttccaataaaagccagacagaagcattctcagaaacttgtttgtgatgtgtgcactcaactaaaagagttgaacctttctattgatagagcagttttgaaacactctttttgtggattctgcaagtggatatttggattgctttgaggatttcgttggaagcgggaattcgtataaaaactagacagcagcattcccagaaatttctttcggatatttccattcgactcatagagatgaacatggcctttcatagagcaggtttgaaacactctttttgtagtttgtggaagtggacatttcgatcgccttgacgcctacggtgaaaaaggaaatatcttcccataaaaaatagacagaagcattctcagaaacttgttggtgatatgtgtcctcaactaacagagttgaactttgccattgatagagagcagttttgaaacactctttttgtggaatctgcaagtggatatttgcatagcttagaggatttcgttggaagcgggaattcaaataaaaggtagacagcagcattctcagaaatttctttctgatgtctgcattcaactcatagagttgaagattccctttcatagagcaggtttgaaacactctttctggagtatctggatgtggacatttggagcgctttgatgcctacggtgagaaagtaaatatcttcccataaaaacgagacagaaggattctcagaaacaagtttgtgatgtgtgtactcagctaacagagtggaacctctcttttgatgcagcagtttggaaacactctttttgtagaaactgtaagtggatatttggatagctctaatgatttcgttggaaacgggagtatcatcatctaaaatctagacagaagcactctcagaaactactttgtgatatctgcattcaagtcacagagttgaacattcgctttcttagagcacgtttgaaacactctttttgtagtgtctggaagtggacatttggagcgctttgatgcctttggtgaaaaagggaatgtttacccataaaaactagacagaagcattctcagaaacttgtttgtgatgtgtgtacccagctaaaggagttgaacatttctgttgatagagcagttttgatacactctttttgtggaaaatgcaagtggatatttggatagcttggaggatttcgttggaagcgggaattcaaataaaaggtagacagcagcattctcagaaatttctttctgatgtctgcattcaactcatagagttgaagattccctttcatagagcaggtttgaaacactcgttctggagtatccggatgtggacatttggagcgctttgatgcctacggtggaaaagtaaatatgttcccataaaaacgagacagaaggattctgagaaacaagtttgtgatgtgtgtactcagctaacagagtggaacctttctttttacagagcagctttgaaactctatttttgtggattctgcaaatggatatttagattgctttaacgatatcgttggaaaagggaatatcgtcatacaaaatctagacagaagcattctcacaaacttgctttgtgatgtgtgtcctcaactaacagagttgaacctttcttttgatgcatcagtttggaaacactctttttgtagaaactgtaagtggatatttggatagctctaacgatttcgttggaaacgggaatatcatcatctaaaatctagacagaagcactattagaaactacttggtgatatctgcattcaagtcacacagttgaacattcccttacttcgaccacgtttgaaacactcttttggaagaatctggaagtggacatttggagcgctttgatgcctttggtgaaaaggaaacgtcttccaataaaagccagagagaagcattctcagaaacttgtttgtgatgtgtgtactcaactaaaagagttgaacctttctattgatagagcagttttgaaacactctttttgtggattctgcaagtggatatttggattgctttgaggatttcgttggaagcgggaattcgtataaaaactagacagcagcattcccagaaatttctttcggatatttccattcaactcatagagatgaacatcgcctttcatagagcaggtttgaaacactctttttgtagtttgtggaagtggacatttcgatcgccttgatgcctacggtgaaaaaggaaatatcttcccataaaaaatagacagaagcattctcagaaacttgttggtgatatgtgtcctcaactaacagagttgaactttgccattgatagagagcagttttgaaacactctttttgtggaatctgcaagtggatatttggatagcttggaggatttcgttggaagcgggaattcaaataaaaggtagacagcaggattctgagaaacaagtttgtgatgtgtgtactcagctaacagagtggaacctctcttttgatgcagcagtttggaaacactctttttgtagaaactgtatgtggatatttggatagctctaatgatttcgttggaaacgggaatatcatcatctaaaatctagacagaagccctctcagaaactactttgtgatatctgcattcaagtaacagagttgaacattcgctttcttagagcacgttggaaacactctttttgtagtgtctggaagtggacatttggagcactttgatgcctttggtgaaaaagggaacgtcttcccataaaaactagacagaagcattctcagaaacttgtttgtgatgtgtgtacccagctaaaggagttgaacatttctattgatagagcagttttgaaacactctttttgtggaaaatgcaagtggatatttggatagcttggaggatttcgttggaagcgggaattcaaataaaaggtagcaggaggctcagaaacaagtttgtgatgtgtgtactcagctaacagagtggatcctttctttttacagagcagctttgaaactctatttctgtggattctgcaaattgatatttgggttgatttaacgatatcgatggaaaagggaatatcttcattcaaaatctagacagaaagcattctcacaaacttctttgtgatgtgtgtcctcaactaacagagttgaacctttcttttgatgcagcaatttggaaacacccttttggtagaaactgtaactggatatttggatagctctaacgatttcgttggaaacgggaatatcatcatctaaaatctagacagagcactattagaaactacttggtgatatctgcattcaagtcacagagttgaacattcccttactttgagcacgtttcaaacactcttttggaagaatctggaagtggacatttggagcgctttgatgcctttggtgaaaaggaaacgtcttccaataaaagccagacagaagcattctcagaaacttgttcgtgatgtgtgtactcaactaaaagagttgaacctttctattgatagcgcagttttgaaacactctttttgtggattctgcaagtggatatttggattgctttgaggatttcgttggaagcgggaattcgtataaaccctagacagcagcattcccagaaatttctttcggatatttccattcaactcatagagatgaacatcgcctttcatagagcaggtttgaaacactctttttgtagtttgtggaagtggacatttcgattgccttgacgcctacggtgaaaaaggaaatatcttcccataaaaaatagacagaagcattctcagaaacttgttggtgatatgtgtcctcaactaacagagttgaactttgccattgatagagagcagttttgaaacactctttttgtggaatctgcaagtggatatttggatagcttggaggatttcgttggaagcgggaattcaaataaaaggtagacagcagcattctcagaaatttctttctgatgtctgcattcaactcatagagttgaagattcccttttcatagagcaggtttgaaacactctttctggagtatctggatgtggacatttggagcgctttgatgcctacggtgaaaaagtaaatatcttcccataaaaacgagacagaaggattctcagaaacaagtttgtgatgtgtgtactcagctaacagagtggaacctctcttttgatgcagcagtttggaaacactctttttgtagaaaatgtaagtggatatttggatagctctaatgatttcgttggaaacgggaatatcatcatctaaaatctagacagaagcagtctcagaaactactttgtgatatctgcattccagtcacagagttgaaaactcccttacttagagcaggtttgaaacactctttttgtagaatctggaagtggacatttggagcgctttgatgcctttggtgaaaaaggaaatgtcttcccttaaaaagtagacagaagcattctcagaaacttgtttgtgatgtgtgtacccagccaaaggggttgaacatttctattgatagagcagttttgaaacactctttttgtggaaaatgcaggtggatatttggatagcttggaggatttcgttggaagcgggaattcaaataaaaggttgacagcagcattctcagaaatttctttctgatgtctgcattcaactcatagagttgaagattccctttcatagagcaggtttgaaacactctttctggagtatctggatgtggacatttggagcgctttgatgcctacggtgaaaaagtaaatatcttcccataaaaacgagacagaaggattctgagaaacaagtttgtgatgtgtgtactcacctaacagagtggaacctttctttttacagagcagctttgaaactctatttttgtggattctgcaaattgatatttagattgctttaacgatatcgttggaaaagggaatatcgtcatacaaaatctagacagaagcattctcacaaacttgctttgtgatgtgtgtcctcaactaacagagttgaacctttcttttgatgcagcaatttggaaacacccttttggtagaaactgtaactggatatttggatagctctaacgatttcgttggaaacgggaatatcatcatctaaaatctagacagaagcactattagaaactacttggtgatatctgcattcaagtcacagagttgaacattcccttactttgagcacgtttgaaacactcttttggaagaatctggaagtggacatttggagcgctttgatgcctttggtgaaaaggaaacgtcttccaataaaagccagacagaagcattctcagaaacttgttcgtgatgtgtgtactcaactaaaagagttgaacctttctattgatagagcagttttgaaacactctttttgcggattctgcaagtggatatttggattgctttgaggatttcgttgaaagcgggaattcgtataaacactagacagcagcattcccagaaatttctttcggatatttccattcgactcatagagatgaacatggcctttcatagagcaggtttgaaacactctttttgtagtttgtggaagtggacatttcgatcgccttgacgcctacggtgaaaaaggaaatatcttcccataaaaaatagacagaagaattctcagaaacttgtttgtgatgtgtatcctcaactgacagagttgaaccttgccattgatagagcagttttgaaacactctgtttgtggaatctgcaagtggatatttggatagcctggaggaattcgttggaagcgggaattcaaataaaaggtagacagcagcattctcagaaatttctttgtgatgcttgcattcaactcatagagttgaacattccctttcatagagcaggtttgaaacactctttctgtactatctggatgtggacatttggaactctttgatgcctacggtgaaaaagtaaatatcttcccataaaaactagacagaaaggattctgagaaacaagtttgtgatgtgtgtactcagctaacagagtggaacctctcttttgatgcagcagtttggaaacactctttttgtagaaactgtaagtggttatttggatagctctaatgatttcgttggaaacgggaatatcatcatctaaaatctagacagaagccttctcagaaactactttgtgatatctgcattcaagtcacagagttgaacattcgctttcttagagcacgttggaaacactctttttgtagtgtctggaagtggacatttggagcgctttgatgcctttggtgaaaaagggaatgtcttcccataaaaactagacagaagcattctcagaaacttgtttgtgatgtgtgtacccagccaaaggagttgaacatttctattgatagagcagttttgaaacgctctttttgtggaaaatgcaggtggatatttggatagcttggaggatttcgttggaagcgggaattcaaataaaaggtagacagcagcattctcagaaatttctttctgatgtctgcattcaactcatagagttgaagattccctttcctagagcaggtttgaaacactctttctggagtatctggatgtggacatttggagcgctttgatgcctacggtgaaaaagtaaatatcttcccataaaaacgagacagaaggattctgagagacaagtttgtgatgtgtgtactcagctaacagagtggaacctttctttttacagagcagctttgaaactctatttttgtggattctgcaaatggatatttagattgctttaacgatatcattggaaaagggaatatcgtcatacaaaatctggacagaagcattctcacaaacttctttgtgatgtgtgtcctcaactaacagagttgaacctttattttgatgcagcagtttggaaacactctttttgtagaaactgtaagtggatatttggatagctctaacgatttcattggaaacgggaatatcatcatctaaaatctagacagaagcactattagaaactacttggtgatatcagcattcaagtcacagagttgaacattcccttacttcgagcacgtttgaaacactcttttggaagaatctggaagtggacatttggagcgctttgatgcctttggtgaaaaggaaacgtcttccaataaaagccagacagaagcattctcagaaacttgttggtgatgtgtgtactcaactaaaagagttgaacctttctattgatagagcagttttgaaacactctttttgtggattctgcaagtggatatttggattgctttgaggatttcgttggaagcgggaattcgtataaacactagacagcagcattcccagaaatttctttcggatatttccattcgactcatagagatgaacatggcctttcatagagcaggtttgaaacactctttttgtagtttgtggaagtggacatttcgatcgccttgacgcctacggtgaaaaaggaaatatcttcccataaaaaatagacagaagcattctcagaaagttgttggtgatatgtgtcctcaactaacagagttgaactttgccattgatagagagcagttttgaaacactctttttgtggaatcagcaagtggatatttggatagcttgaaggatttcgttggaagcgggaattcaaataaaaggtagacagcagcattctcagaaatttctttctgatgtctgcattcaactcatagagttgaagattccctttcatagagcaggtttgaaatactctttctgtagtatctggatgtggacatttggagcgctttgaggcctacgatgaaaaagtaaatatcttcccataaaaacgagacagaaggattctgagaaacaagtttgtgatgtgtgtactcagctaacagagtggaacctctcttctgatgcagcagtttggaaacactctttttgtagaaactgtaagtggatatttggttagctctaatgatttcgttggaaatgggaatatcatcatctaaaatctagacagaagccctctcagaaactactttgtgatatctgcattcaagtcacagagttgaacattcgctttcttagagcacgtttgaaacactctttttgtagtgtctggaagtggacatttggagtgctttgatgcctttggtgaaaaagggaatgtcttcccataaaaactagacagaagcattctcagaaacttgtttgtgatgtgtgtacccagctaaaggagttgaacatttctattgatagagcagttttgaaacactctttttgtggaaaatgcaagtggatatttggatagcatggaggatttcgttggaagcgggaattcaaataaatggtagacagcagcattctcagaaatttctttctgatgtctgcattcaactcatagagttaaagattccctttcatagagcaggtttgaaacactcgttctggagtatctggatgtggacatttggagcgctttgatgcctacggtggaaaagtaaatatcttcccataaaaacgagacagaaggattctcagaaacaagtttgtgatgtgtgtactcagctaacagagtggaacctttctttttaaagagcagctttgaaactctatttttgtggattctgcaaattgatatttagattgctttaacgatatcgttggaaaagggaatatcgtcatacaaaatctagacagaagcattctcacaaacttctttgtgatgtgtgtcctcaactaacagagttgaacctttcttttgatgcagcaatttggaaacacccttttggtagaaactgtaactggatatttggatagctctaacgatttcgttggaaacgggaatatcatcatctaaaatctagacagaagcactattagaaactacttggtgatatctgcattcaagtcacagagtagaatattcccttacttcgagcacgtttgaaacactcttttggaagaatctggaagtggacatttggagcgctttgatgcctttggtgaaaaggaaacgtcttccaataaaagccagacagaagcattctcagaaacttgtttgtgatgtgtgtactcaactaaaagagttgaacctttctattgatagagcagttttgaaacactctttttgtggattctgcaagtggatatttggattgctttgaggatttcgttggaagcgggaattcgtataaaaactagacagcagcattcccagaaatttctttcggatatttccattcgactcatagagatgaacatggcctttcatagagcaggtttgaaacactctttttgtagtttgtggaagtggacatttcgatcgccttgacgcctatggtgaaaaaggaaatatcttcccataaaaaatagacagaagcattctcagaaacttgttggtgatatgtgtcctcaactaacagagttgaactttgccattgatagagagcagttttgaaacactctttttgtggaatctgcaagtggatatttggatagcttggaggatttcgttggaagcgggaattcaaataaaaggtagacagcagcattctcagaaatttctttctgatgtctgcattcaactcgtagagttgaacattccctttcatagagcaggtttgaaacactctttctggagtatctggatgtggacatttggagcgctttgatgcctacggtgaaaaagtaaatatcttcccataaaaacgagacagaaggattctgagaaacaagtttgtgatgtgtgtactcggctaacagagtggaacctctcttttgatgcagcagtttggaaacactctttttgtagaaactgtaagtggatatttggatagctctaatgatttcgttggaaacgggaatatcatcatctaaaatctagacagaagcactctcagaaactactgtgtgatatctgcattcaagtcacagagttgaacattcgctttcttagagcacgtttgaaacactctttttgtagtgtctggaagtggacatttggagcgctttgattcctttggtgaaaaagggaatgtcttcccataaaaactaggcagaagcattctcagaaacttgtttgtgatgtgtgtacccagctaaaggagttgaacatttctattgacagagcagttatgaaacactctttttgtggaaaatgcaagtggatatttggatagcttggaggatttcgttggaagcgggaattcaaataaaaggtagacagcagcattctcagaaatttctttctgatgtctgcattcaactcatagagttgaagattccctttcatggagcaggtttgaaacactcgttctgcagtatctggatgtggacatttggagcgctttgatgcctacggtggaaaagtaaatatcttcccataaaaacgagacagaaggattctgaggaacaagtttgtgatgtgtgtactcagctaacagagtggaacctttctttttacagagcagctttgaaactctatttttgtggattctgcaaatggatatttagattgctttaatgatatcgttggaaaagggaatatcgtcatacaaaatctagacagaagcattctcacaaacttctttgtgatgtgtgtcctcaactaacagagttgaacctttcttttgatgcagcaatttggaaacacccttttggtagaaactgtaactggatatttggatagctctaacgatttcgttggaaacgggaatatcatcatctaaaatgtagacagaagcactattagaaactacttggtgatatctgcattcaagtcacagagttgaacattcccttactttgagcacgtttgaaacactcttttggaagaatctggaagtggacatttggagcgctttgatgcctttggtgaaaaggaaacgtcttccaataaaagccagagagaagcattctcagaaacttgtttgtgatgtgtgtactcaactaaaagagttgaacctttctattgatagagcagttttgaaacactctttttttggattctgcaagtggatatttggattgctttgaggatttcgttggaagcgggaattcgtataacaactagacagcagcattcccagaaatttctttcggatatttccattcaactcatagagatgaacatggcctttcatagagcaggtttgaaacactctttttgtagtttgtggaagtggacatttcgatcgccttgacgcctacggtgaaaaaggaaatatcttcccataaaaaatagacagaagcattctcagaaatatctttctgatgtttgcattcaactcatagagttgaacattccctttaatagagcaggtttgaaacactctttctgtactatctggatgtggacatttggagcgctttgacgcctacggtgaaaaaggaaatgtcttcccataaaaaattgaagaagcattctcagaaattactttctgatgtctgcattcaactcatagagttgaaaactccctttcatagcgcaggtttgaaacactctttctgtagtatctggatgtggacatttggagcgctttgatacctacggtgaaaaagtaaatatcttcccataaaaactagacagaaggattctgagaaacaagtttgtgatgtgtgtactcagctaacagagtggaacctctcttttgatgcagcagtttggaaacactctttttgtagaaactgtaagtggatatttggatagctctaatgatttcgttgaaaacgggaatatcatcatgtaaaatctagacagaagcactctcagaaactactttgtgatatctgcattcaagtcacagagttgaacattcgctttcttagagcacgtttgaaacactctttttgtagtctctggaagtggacatttggagcgctttgatggctttggtgaaaaagggaacgtcttcccataaaaactagacagaagcattctcagaaacttgtttgtgatgtgtgtacccagccaaaggagttgaacgtttctattgatagagcagttttgaaacactcttgttgtggaaaatgcaggtggatatttggatagcttggaggatttcgttggaagcgggaattcaaataaaaggtagacagcagcattctcagaaatttctttctgatgtctgcattcaactcatagagttgaagattccctttcatagagcaggtttgaaacactcgttctggagtatctggatgtggacatttggagcgctttgatgcctacggtggaaaagtaaatatcttcccataaaaacgagacagaaggattctgagagacaagtttgtgatgtgtgtactcagctaacagagtggaacctttctttttacagagcagctttgaaactctatttttgtggattctgcaaatggatatttagattgctttaatgatatcgctggaaaagggaatatggtcatacaaaatctagacagaagcattctcacaaacttctttgtgatgtgtgtcctcaactaacagagttgaacttttcttctgatgcagcagtttggaaacactgtttttgtagaaactgtaagtggatatttggatagctctaacgatttcgttggaaacgggaatatcatcatctaaaatctagacagaagcactattagaaactacttggtgatatctgcattcaagtcacagagttgaacattcccttactttgagcacgtttcaaacactcttttggaagaatctggaagtggacatttggagcgctttgatgcctttggtgaaaaggaaacgtcttccaataaaagccagacagaagcattctcagaaacttgtttgagatgtgtgtactcaactaaaagagttgaacctttctattgatagagcagttttgaaacactctttttgtggattctgcaagtggatatttggattgctttgaggatttcgttggaagcgggaattcgtataacaactagacagcagcattcccagaaatttctttcggatatttccattcaactcatagagatgaacatcgcctttcatagagcaggtttgaaacactctttttgtagtttgtggaagtggacatttcgatcgccttgacgcctacggtgaaaaaggaaatatcttcccataaaaaatagacagaagcattctcagaaacttgttggtgatatgtgtcctcaactaacagagttgaactttgccattgatagagagcagttttgaaacactctttttgtggaatctgcaagtggatatttggatagcttggaggatttcgttggaagcgggaattcaaataaaaggtagacagccagcattctcagaaattgctttctgatgtctgcattcaactcatagagttgaacattccctttcatagggcaggtttgaaatactctttctgtagtatctggatgtggacatttggagcgctttgatgcctacggtgaaaaagtaaatatcttcccataaaaacgagacagaggattctgagaaacaagtttgtgatgtgtgtactcagctaacagagtggaacctctgttttgatgcagcagtttggaaacactctttttgtagaaactgtaagtggatatttggatagctctaatgatttcgttggaaacgggaatatcatcatctaaaatctagacagaagccctctcagaaactactttgtgatatctgcattcaagtcacagagttgaacattcggtttcttagagcacgtttgaaacactctttttgtagtgtctggaagtggacatttggagcgctttgatgcctttggtgaaaaagggaatgtcttcccataaaaactagacagaagcattctcagagacttgtttgtgatgtgtgtacccagccaaaggagttgaacatttctattgatagagcagttttgaaacactcttgttgtggaaaatgcaggtggatatttggatagtttggaggatttcgttggaagcgggaattcaaataaaaggtagacagcagcattctcagaaatttctttctgatgtctgcattcaactcatagagttgaagattccctttcatagagcaggtttgaaacactcgttctggagtatctggatgtggacatttggagcgctttgatgcctacggtggaaaagtaaatatcttcccataaaaacgagacagaaaggattctgagaaacaagtttgtgatgtgtgtactcagctaacacagtggaacctttctttttacagagcagctttgaaactctatttttgtggattctgcaaattgatatttagattgctttaacgatatcgttggaaaagggaatatcgtcatacaaaatctagacagaagcattctcacaaacttctttgtgatgtgtgtcctcaactaacagagttgaacctttcttttgatgcagcaatttggaaacacccttttggtagaaactgtaactggatatttggatagctctaacgatttcgttggaaacgggaatatcatcatctaaaatctagacagaagcactctcagtaaactactttttgatatctgcattcaagtcacagagttgaacattcccttactttgagcacgtttgaaacactcttttggaagaatctggaagtggacatttggagcgctttgatgcctttggtgaaaaggaaacgtcttccaataaaagcccaacagcagcattctcagaaacttgtttgtgatgtgtgtactcaactaaaagagttgaacctttctattcatagagcagttttgaaacactctttttgtggattctgcaagtggatatttggattgatttgaggatttcgttggaagcgggaattcgtataaaaactagacagcagcattcccagtaaatttctttcggatatttccattcaactcatagagatgaacatcgcctttcatagagcaggtttgaaacactctttttgtagtttgtggaagtggacatttcgatcgccttgacgcctacagtgaaaaaggaaatatcttcccataaaaaatagacagaagcattctcagaaacttgttggtgatatgtgtcctcaactaacagagttgaactttgccattgatagagagcagttttgaaacactctttttgtggaatctgcaagtggatatttggatagcttggaggatttcgttggaagcgggaattcaaataaagggtagacagcagcattctcagaaatttctttctgatgtctgcattcaactcatagagttgaagattccctttcatagagcaggtttgaaacactctttctggagtatctggatgtggacatttggagcgctttgatgcctacggtggaaaagtaaatatcttcccataaaaacgagacagaaggattctgagagacaagtttgtgatgtgtgtactcagctaacagagtggaacctttctttttacagagcagctttgaaactctatttttgtggattctgcaaatggatatttagattgctttaacgatatccgttggaaaagggaatatcgtcatacaaaatctggacagaagcactctcagaaactactttttaatatctgcattcaagtcacagagttgaacattcgctttcttagagcacttttgaaacactctttttgtagtatctggaagtggacatttggagctctttgatgcctttggtgaaaaaggaaatgtcttcccataaaaactagacagaagctttctcagaaacttgtttgtgatgtgtgtacccagcgaaaggagttgaacatttctattgatagagcagttttgaaacactctttttgtagaatctgcaagtggatatttggatagcttggaggttttcgttggaagcgggaattcaaataaaaggtagacagcagcattctcagaaatttctttctgatgtctgcattcaactcatagagttgaagattccctttcatagagcaggtttgaaacactctttctggagtatctgtatgtggacatttggagcgctttgatgcctacggtgaaaaagtaaatatcttcccataaaaacgagacagaaggattctgagaaacaagtttgtgatgtgtgtactcagctaacagagtggaacctttctttttacagagcagctttgaaactctatttttgtggattctgcaaatggatatttagattgctttaatgatatcgctggaaaagggaatatcgtcatacaaaatctagacagaagcatgctcacaaacttctttgtgacgtgtgtcctcaactaacagagttgaacctttcttttgatgcagcagtttggaaacactctttttgtagaaactgtaagtggatatttggatagctctaacgatttcgttggaaacgggaatatcatcatctaaaatctagacagaagcactattagaaactacttggtgatatctgcattcaagtcacagagttgaacattcccttactttgagcacgtttgaaacactcttttggaagaatctgtaagtggacatttggagcgctttgatgcctttggtgaaaaggaaacgtcttccaataaaagccagacagaagcattctgagaaacttgttcgtgatgtgtgtactcaactaaaagagttgaacctttctattgatagagcagttttgaaacactctttttgtggattctgcaagtggatatttggattgctttgaggatttcgttggaagcgggaattcgtataaacactagacagcagcattcccagaaatttctttcggatatttccattcaactcatagagatgaacatcgcctttcatagagctggtttgaaacactctttttgtagtttgtggaagtggacatttcgatcgccttgacgcctacagtgaaaaaggaaatatcttcccataaaaaatagacagaagcattctcagaaacttgttggtgatatgtgtcctcaactaacagagttgaactttgccattgatagagagcagttttgaaacactctttttgtggaatctgcaagtggatatttggatagcttggaggatttcgttggaagcgggaattcaaataaaaggtagacagcagcattctcagtaaatttctttctgatgtctgcattcaactcatagagttgaagattccctttcatagagcaggtttgaaacactctttctggagtatctggatgtggacatttggagcgctttgatgcctacggtgaaaaagtaaatatcttcccagaaaaacgagacagaaggattctgagaaacaagtttgtgatgtgtgtactcagctaacagagtggaacctctcttttgatgcagcagtttggaaacactctttttgtagaaactgtaagtggatatttggatagctctaatgatttcgttggaaacgggaatatcatcatctaaaatctagacagaagccctctcagaaactactttgtgacatctgcattcaagtcacagagttgaacattcgctttcttagagaacgttggaaacactctttttgtagtgtctggaagtggacatttggagcgctttgatgcctttggtgaaaaagggaatgtcttcccataaaaactagacagaagcattctcagagacttgtttgtgatgtgtgtacccagccaaaggagttgaacatttctattgatagagcagttttgaaacactcttgttgtggaaaatgcaggtggatatttggatagcttggaggatttcgttggaagcgggaattcaaataaaaggtagacagcagcattctcagaaatttctttctgatgtctgcattcaactcatagagttgaagattccctttcatagagcaggtttgaaacactcgttctggagtatctggatgtggacatttggagcgctttgatgcctacggtggaaaagtaaatatcttcccataaaaacgagacagaaggattctcagaaacaagtttgtgatgtgtgtactcagctaacagagtggaacctttctttttacagagcagctttgaaactctatttttgtggattctgcaaattgatatttagattgctttaacgatatcgttggaaaagggaatatcatcatacaaaatctagacagaagcattctcacaaacttctttgtgatgtgtgtcctcaactaacagagttgaacctttcttttgatgcagcaatttggaaacacccttttggtagaaactgtaactggatatttggatagctctaacgatttcgttggaaacgggaatatcatcatctaaaatgtagacagaagcactattagaaactacttggtgatatctgcattcaagtcacagagttgaacattcccttactttgagcacgtttgaaacactcttttggaagaatctggaagtggacatttggagcgctttgatgcctttggtgaaaagggaaacgtcttccaataaaagccagacaggaagcattctcagaaacttgttcgtgatatgtgtactcaactaaaagagttgaacctttctattcatagcgcagttttgaaacactctttttgtggattctgcaagtggatatttggattgctttgaggatttcgttggaagcgggaattcatataaaaactagacagcagcattcccagaaatttctttcggatatttccattcgactcatagagatgaacatggcctttcatagagcaggtttgaaacactctttttgtagtttgtggaagtggacatttcgatcgccttgacgcctacggtgaaaaaggaaatatcttcccataaaaaatagacagaagcattctcagaaacttgttggtgatatgtgtcctcaactaacagggttgaactttgccattgatagagagcagttttgaaacactctttttgtggaatctgcaagtggatatttggatagcttggaggatttcgttggaagcgggaattcaaataaaaggtagacagcagcattctcagaaatttctttctgatgtctgcattcaactcatagagttgtagattccctttcatagagcaggtttgaaacactcgttctggagtatctggatgtggacatttggagcgctttgatgcctacggtggaaaagtaaatatcttcccataaaaacgagacagaaggattctgagaaacaagtttgtgatgtgtgtactcagctaacagagtggaacctctcttttgatgcagcagtttggaaacactctttttgtagaaactgtaagtggatatttggatagctctaatgatttcgttggaaacgggaatatcatcatctaaaatctagacagaagcactattagaaactactttgtgatatctgcattcaagtcacaggagttgaacattcgctttcttagagcacgttggaaacactctttttgtagtgtctggaagtggacatttggagcgctttgatgcctttggtgaaaaagggaatgtcttcccataaaaactagacagaagcattctcagaaacttgtttgtgatgtgtgtacccagccaaaggagttgaaaatttctattgatagagcagttttgaaacactcttgttgtggaaaatgcaggtggatatttggatagctgggaggatttcgttggaagcgggaattcaaataaaaggtagacagcagcattctcagaaatttctttctgatgtctgcattcaactcatagagttgaagattccctttcatagagcaggtttgaaacactcgttctggagtatctggatgtggacatttggagcgctttgatgcctacggtggaaaagtaaatatcttcccataaaaacgagacagaaggattctcagaaacaagtttgtgatgtgtgtactcagctaacagagtggaacctttctttttacagagcagctttgaaactctatttttgtgaattctgcaaattgatatttagattgctttaacgatatcgttggaaaagggaataccgtcatacaaaatctagacagaagcattctcacaaacttctttgtgatgtgtgtcctcaactaacagagttgaacctttcttttgatgcagcagtttggagacactctttttgtagaaactgtaagtggatatttggatagctctaacgatttcgttggaaacgggaatatcatcatctaaaatctagacagaagcactattagaaactacttggtgatatctgcattcaagtcacagagttgaacattcccttactttgggcacgtttcaaacactcttttggaagaatctggaagtggacatttggagcgctttgatgcctttggtgaaaaggaaacgtcttccaataaaagccagacagaagcattctcagaaacttgttcgtgatgtgtgtactcaactaaaagagttgaacctttctattgatagagcagttttgaaacactctttttgtggattctgcaagtggatatttggattgctttgaggatttcatcggaagcgggaattcgtataaacactagacagccagcattcccagaaatttctttcggatatttccattcgactcatagagatgaacatggcctttcatagagcaggtttgaaacactctttttgtagtttgtggaagtggacatttcgatcgccttgacgcctacggtgaaaaaggaaatatcttcccataaaaaatagacagagcattctcagaaacttgttggtgatatgtgtcctcaactaacagagttgaactttgccattgatagagagcagttttgaaacactctttttgtggaatctgcaagtggatatttggatagcttggaggatttcgttggaagcgggaattcaaataaaaggtagacagcagcattctcagaaatttctttctgatgtctgcaatcaactcatagagttgaagattccctttcatagagcaggtttgaaacactctttgtggagtatctggatgtggacatttggagcgctttgatgcctacggtgaaaaagtaaatatcttcccataaaaacgagacagaaggattctgagaaacaagtttgtgatgtgtgtactcagctaacagagtggaacctctcttttgatgcagcagtttggaaacactctttttgtagaaactgtaagtggatatttggatagctctaatgatttcgttggaaacgggaatatcatcatctaaaatctagacagaagccctctcagaaactactttgtgatatctgcattcaagtcacagagttgaacattcgctttcttagagcacgttggaaacactctttttgtagtgtctggaagtggacatttggagcgctttgattcctttggtgaaaaagggaacgtctacccataaaaactagacagaagcattctcagaaacttgtttgtgatgtgtgtacccagccaaaggagttgaacatttctattgatagagcaggtttgaaacactctttttgtggaaaatgcaggtggatatttggatagcttggaggatttcgttggaagcgggaattcaaataaaaggtagacagcagcattctcagaaattactttctgatgtctgcattcaactcatagagttgaagattccctttcatagagcaggtttgaaacactctttctggagtatctggatgtggacatttggagcgctttgatgcctacggtgaaaaagtaaatatcttcccataaaaacgagacagaaggattctcagaaacaagtttgtgatgtgtgtactcagctaacagagtggaacctttctttttacagagcagctttgaaactctattgttgtggattctgcaaattgatatttagattgctttaacgatatcgttggaaaagggaataccgtcatacaaaatctagacagaagcattctcacaaacttctttgtgatgtgtgtcctcaactaacagagttgaacctttcttttgatgcagcaatttggaaacacccttttggtagaaactgtaagtggatatttggatagctctaacgatttcgttggaaacgggaatatcatcatctaaaatctagacagaagcactattagaaactacttggtgatatctgcattcaagtgacagagttgaacattcccttactttgagcacgtttgaaacactcttttggaagaatctggaagtggacatttggagcgctttgatgcctttggtgaaaaggaaacgtcttccaataaaagccagacagaagcattctcagaaacttgttcgtgatgtgtgtactcaactaaaagagttgaacctttctattgatagagcagttttgaaacactctttttgtggattctgcaagtggatatttggattgctttgaggattttgttggaagcgggaattcgtataaacactagacagcagcattcccagaaatttctttcggatatttccattcaactcatagagatgaacatggcctttcatagaacaggtttgaaacactctttttgtagtttgtggaagtggacatttcgatcgccttgacgcctacggtgaaaaagggaatatctacccataaaaaatagacagaagcattctcagaaacttgttggcgatatgtgtcctcaactaacagagttgaactttgctattgatagagagcagttttgaaacactctttttgtggaatctgcaagtggatatttggatagcttggaggatttcgttggaagcgggaattcaaataaaaggtagacagcagcattctcagaaatttctttctgatctctgcattcaactcatagagttgaacattccctttcatagggcaggtttgaaatactctttctgtagtatctggatgtggacatttggagcgctttgatgcctacggtgaaaaagtaaatatcttcccataaaaacgagacagaaggattctgagaaacaagtttgtgatgtgtgtactcagctaacagagtggaacctctcttttgatgcagcagtttggaaacactctttttgtagaaattgtaagtggatatttggatagctctaatgatttcgttggaaacgggaatatcatcatctaaaatctagacagaagcactctcagaaactactttgtgatatctgcattcaagtcacagagttgaacattcgctttcttagagcacgttggaaacactctttttgtagtgtctggaagtggacacttggagcgctttgatgcctttggtgaaaaagggaacgtcttcccataaaaactagacagaagcattctcagaaacttgtttgtgatgtgtgtacccagctaaaggagttgaacatttctattgatagagcagttttgaaacactctttttgtggaaaatgcaagtggatatttggatagcttggaggatttcgttggaagcgggaattcaaataaaaggtagacagcagcattctcagaaatttctttctgatgtctgcattcaactcatagagttgaagattccctttcatagagcaggtttgaaacactctttctggagtatctggatgtggacatttggagggctttgatgcctacggtgaaaaagtaaatatcttcccataaaaacgagacagaaggattctgagaaacaagtttgtgatgtgtgtactcagctaacagagtggaacctttctttttacagagcagctttgaaactctatttttgtggattctgcaaattgatatttagattgctttaacgatatcgttggaaaagggaatatcgtcatacaaaatctagacagaagcattctcacaaacttctttgtgatgtgtgtcctcaactaacagagttgaacctttcttttgatgcagcagtttggaaacactctttttgtagaaactgtaagtggatatttggataactctaacgatttcgttggaaacgggaatatcatcatctaaaatctagacagaagcactattagaaactacttggtgatatctgcattcaagtcacagagttgaacattcccttactttgagcacgtttcaaacactcttttggaagaatctggaagtggacatttggagcgctttgatgcctttggtgaaaaggaaacgtcttccaataaaagccagacagaagcattctcagaaacttgttcttgacgtgtgtactcaactaaaagagttgaacctttctattgatagagcagttttgaaacactctttctgtggattctgcaagtggatatttggattgctttgaggatttcgttggaagcggtaattcgtataacaactagacagcagcattcccagaaatttctttcggatatttccattcaactcatagagatgaacatggcctttcatagagcaggtttgaaacactctttttgtagtttgtggaagtggacatttcgatcgccttgacgcctacagtgaaaaaggaaatatcttcccataaaaaatagacagaagcattctcagaaacttgttggtgatatgtgtcctcaactaacagagttgaactttgccattgatagagagcagttttgaaacactctttttgtggaatctgcaagtggatatttggatagcttggaggatttcgttggaagcgggaattcaaataaaaggtagacagccgcattctcagaaatttctttctgatgtctgcattcaactcatagagttgaacattccctttcatagagcaggtttgaaacactctttctggagtatctggatgtggacatttggagcgctttgatgcctacggtgaaaaagtaaatatcttcccataaaaacgagacagaaggattctcagaaacaagtttgtgatgtgtgtactcagctaaaagagtggaacctctcttttgatgcagcagtttggaaacactctttttgtagaaactgtaagtggatatttggatagctctaatgatttcgttggaaacgggaatatcatcatctaaaatctagacagaagcactctcagaaactactttgtgatatctgcattcaagtcacagagttgaacattcgctttcttagagcacgtttgaaacactctttttgtagtggctggaagtggacatttggagcgctttgatgcctttggtgaaaaagggaatgtcttcccataaaaactaggcagaagcattctcagaaacttgtttgtgatgtgtgtacccagccaaaggagttgaacatttctattgatagagcagttttgaaacactcttgttgtggaaaatgcaagtggatatttggatagcttggaggatttcgttggaagcgggaattcaaataaaaggtagacagcagcattctcagaaatttctttctgatgtctgcattcaactcatagagttgaagattccctttcatagagcaggtttgaaacagtctttctggagtttctggatgtggacatttggagcgctttgatgcctacggtgaaaaagtaaatatcttcccataaaaacgagacagaaggattctcagaaacaagtttgtgatgtgtgtactcagctaacagagtggaacctttctttttacagagcagctttgaaactctatttttgtggattctgcaaatggatatttagattgctttaacgatatcgttggaaaagggaatatcgtcatacaaaatactggacagaagcattctcacaaacttctttgtgatgtgtttcctcaactaacagagttgaacctttcttttgatgcagcaatttggaaacacccttttggtagaaactgtaactggatatttggatagctctaacgatttcgttggaaacgggaatatcatcatctaaaatctagacagaagcactattagaaactacttggtgatatctgcattcaagtcacagagtagaacattcccttacttcgagcacgtttgaaacactcttttggaagaatctggaagtggacatttggagcgctttgatgcctttggtgaaaaggaaacgtcttccaataaaagccagacagaagcattctcagaaacttgtttgtgatgtgtgtactcaactaaaagagttgaacctttctattgatagagcagttttgaaacactctttttgtggattctgcaagtggatatttggattgctttgaggatttcgttggaagcgggaattcgtataacaactagacagcagcattcccagaaatttctttcggatatttccattcaactcatagagatgaacatggcctttcatagagcaggtttgaaacactctttttgtagtttgtggaagtggacatttcgatcgccttgacgcctacggtgaaaaagtaaatatcttcccataaaaaatagaaacattctcagaaacttgttggtgatatgtgtcctcaactaacagagttgaactttgccattgatagagagcagttttgaaacactctttttcctgaatctgcaagtggatatttggatagtttggaggatttcgttggaagcgggaattcaaataaaaggtagacagcagcattctcagaaatttctttctgatctctgcattcaactcatagagttgaacattccctttcatagggcaggtttgaaatactctttctgtagtatctggatgtggacatttggagcgctttgatgcctacggtgaaaaagtaaatatcttcccataaaaacgagacagaaggattctgagaaacaagtttgtgatgtgtgtactcagctaacagagtggaacctctcttttgatgcagtagtttggaaacactctttttgtagaaactgtaaggggatatttggatagctctaatgatttcgttggaaacgggaatatcatcatctaaaatctagagagaagccctctcagaaactactctgtgatatctgcattcaagtcacagagttgaacattcgttttcttagagcacgtttgaaacactctttttgtagtgtctggaagtggacatttggagcgctttgatgcctttggtgaaaaagggaatgtcttcccataaaaactagacagaagcattctcagaaacttgtttgtgatgtgtgtacccagccaaaggagttgaacatttctattgatagagcagttttgaaacactctttttgtggaaaatgcaggtggatatttggatagcttggaggatttcgttggaagcgggaattcaaataaaaggtagacagcagcattctcagaaatttctttctgatgtctgcattcaactcatagagttgaagattcccttccatagagcaggtttgaaacactcgttctggagtatctggatgtggacatttggagcgctttgatgcctacggtggaaaagtaaatatcttcccataaaaacgagacagaaggattctcagaaacaagtttgtgatgtgtgtactcagctaacagagtggaacctttctttttacagagcagctttgaaactctatttttgtggattctgcaaattgatatttagattgctttaacgatatcgttggaaaagggaatatcgtcatacaaaatctagacagaagcattctcacaaacttctttgtgatgtgtgtcctcaactaacagagttgaacctttcttttgatgcagcagtttggaaacactctttttgtagaaactgtaagtggatatttggatagctctaacgatttcgttggaaacgggaatatcatcatctaaaatctaaacagaagcactattagaaactacttggtgatatctgcattcaagtcacagagttgaacattcccttacttcgaccacgtttgaaacgctcttttggaagaatctggaagtggacatttggagcgctttgatgcctttggtgaaaaggaaacgtcttccaataaaagccagagagaagcattctcagaaacttgttcgtgatgtgtgtactcaactaaaagagttgaacctttctattgatagagcagttttgaaacactctttttgtggattctgcaagtggatatttggattgctttgaggatttcattggaagcgggaattcgtataaacactagacagcagcattcccagaaatttctttcggatatttccattcgactcatagagatgaacatggcctttcatagagcaggtttgaaacactctttttgtagtttgtggaagtggacatttcgatcgccttgacgcctacggtgaaaaaggaaatatcttcccataaaaaatagacagaagcattctcagaaacttgttggtgatatgtgtcctcaactaacagagttgaactttgccattgatagagagcagttttgaaacactctttttgtggaatctgcaagtggatatttggatagcttggaggatttcgttggaagcgggaattcaaataaaaggtagacaacagcattctcagaaatttctttctgatgtctgcattcaactcatagagttgaagattccctttcatagagcaggtttgaaacactctttctggagtatctggatgtggacatttggagagctttgatgcctacggtgaaaaagtaaatatcttcccataaaaacgagacagaaggattctgagaaacaaatttgtgatgtgtgtactcagctaacagagtggaacctctcttttgatgcagcagtttggaaacactctttttgtagaaactgtaagtggatatttggaagctctaatgattttgttggaaacgggattatcatcatctaaaatctagacagaagccctctcagaaactactttgtgatatgtgcattcaagtcacagagttgaacattcgctttcttagagcacgttggaaacactctttttgtagtgtctggaagtggacatttggagcgctttgatgcctttggtgaaaaagggaacgtcttcccataaaaactagacagaagcattctcagaaacttgtttgtgatgtgtgtacccagccaaaggagttgaacatttctattgatagagcagttttgaaacactcttgttgtggaaaatgcaggtggatatttggatagcttggaggatttcgttggaagggggaattcaaataaaaggtagacagcagcattctcagaaatttctttctgatgtctgcattcaactcatagagttgaagattccctttcatagagcaggtttgaaacactcgttctggagtatctggatgtggacatttggagcgctttgatgcctatggtggaaaagtaaatatcttcccataaaaacgagacagaaggattctcagaaacaagtttgtgatgtgtgtactcagctaacagagtggaacctttctttttacagagcagctttgaaactctatttttgtggattctgcaaattgatatttagattgctttaacgatatcgttggaaaagggaatatcgtcatacaaaatctagacagaagcattctcacaaacttctttgtgacgtgtgtcctcaactaacagagttgaacctttcttttgatgcagcagtttggaaacactgtttttgtagcaactgtaagtggatatttggatagctctaacgatttcgttggaaacgggaatatcatcatctaaaatctagacagaagcactctcagaaactactttgtgatatctgcattcaagtcacagagttcaacatttgctttcttagagcacgtttgaaacactctttttgtagtgtctggaagtggacatttggagcgctttgatgcctttggtgaaaaggaaacgtcttccaataaaagccagacagaagcattctcagaaacttgtttgtgatgtgtgtactcaactaaaagagttgaacctttctattgatagagcagttttgaaacactctttttgtggattctgcaagtggatatttggattgctttgaggatttcgttggaagcgggaattcgtataaacactagacagcagcattcccagaaatttctttcggatatttccattcaactcatagagatgaacatcgcctttcatagagcaggtttgaaacactctttttgtagtttgtggaagtggacatttcgatcgccttgacgcctacggtgaaaaaggaaatatcttcccataaaaaatagacagaagcattctcagaaacttgttggtgatatgtgtcctcaactaacagagttgaactttgccattgatagagagcagttttgaaacactctttttgtggaatctgcaagtggatatttggatagcttggaggatttcgttggaagcgggaattcaaataaaaggtagacagcagcattctcagaaatttctttctgatgtctgcattcaactcatagagttgaagattccctttcatagagcaggtttgaaacactctttctggagtatctggatgtggacatttggagcgctttgatgcctacggtgaaaaagtaaatatcttcccataaaaacgagactgaaggattctgagaaacaagtttgtgatgtgtgtactcagctaacagagtggaacctctcttttgaagcagcagtttggaaacactctttttgtggaaactgtaagtggatatttggatagctctaatgatttcgttggaaacgggaatatcatcatctaaaatctagacagaagccctctcagaaactactttgtgatatctgcattcaagtcacagagttgaacattcgctttcttagagcacgttggaaacacactttttgtagtgtctggaagtggacatttggagcgctttgatgcctttggtgaaaaagggaatgtcttcccataaaaactagacagaagcattctcagaaacttgtttgtgatgtgtgtacccagccaaaggagttgaacatttctattgatagagcagttttgaaacactcttgttgtggaaaatgcaggtggatatttggatagcttggaggatttcgttggaagcgggaattcaaataaaaggtagacagcagcattctcagaaatttctttctgatgtctgcattcaactcatagagttgaagattccctttcatagagcaggtttgaaacactcgttctggagtatctggatgtggacatttggagcgctttgatgcctacggtggaaaagtaaatatcttcccataaaaacgacacagaaggattctgagaaacaagtttgtgatgtgtgtactcagctaacagagtggaacctttctttttacagagcagctttgaaactctatttttgtggattctgcaaatggatatttagattgctttaatgatatcgctggaaaagggaatatggtcatacaaaatctagacagaagcattctcacaaacttctttgtgacgtgtgacctcaactaacagagttgaacctttcttttgatgcagcagtttggaaacactgtttttgtagcaactgtaagtggatatttggatagctctaacgatttcgttggaaacgggaatatcatcatctaaaatctagacagaagcactattagaaactacttggtgatatctgcattcaagtcacagagttgaacattcccttactttgagcacgtttcaaacactcttttggaagaatctggaagtggacatttggagcgctttgatgcctttggtgaaaaggaaacgtcttccaataaaagccagaccgaagcattctcagaaacttgtttgtgatgtgtgtactcaactaaaagagttgaacctttctattgatagagcagttttgaaacactctttttgtggattctgcaagtggatatttggattgctttgaggatttcgttggaagcgggaattcgtataaaaactagacagcagcattcccagaaatttctttctgatatttccattcaactcatagagatgaacatggcctttcatagagcaggtttgaaacactctttttgtagtttgtggaagtggacatttcgatcgccttgacgcctacggtgaaaaaggaaatatcttcccataaaaaatagacagaagcattctcagaaacttgttggtgatatgtgtcctcaactaacagagttgaactttgccattgatagagagcagttttgaaacactctttttgtggaatctgcaagtggatatttggatagcttggaggatttcgttggaagcgggaattcacataaaaggtagacagcagcattctcagcaaatttctttctgatgtctgcattcaactcatagagttgaagattccctttcatagagcaggtttgaaacactctttctggagtatctggatgtggacatttggagcgctttgatgcctacggtgaaaaagtataatcttcccataaaaacgagacagaaggattctgagaaacaagtttgtgatgtgtgtactcagctaacagagtggaacctctcttttgatgcagcagtttggaaacactctttttgtagaaactgtaagtggatatttggatagctctaatgatttcgttggaaacgggaatatcatcatctaaaatctagacagaagccctctcagaaactactttgtgatatctgcattcaagtcacagggttgaacattcgctttcttagagcacgtttgaaacactctttttgtagtgtatggaagtggacatttggagcgctttgatgcctttggtgaaaaagggaacgtcttcccataaaaactagacagaagcattctcagaaacttgtttgtgatgtgtgtacccagccaaaggagttgaacatttctattgatagagcagttttgaaacacttgttgtggaaaatgcaggtggatatttggatagcttggaggatttcgttggaagcgttaattcaaataaaaggtagacagcagcattctgagaaatttctttctgatgtctgcattcaactcatagagttgaagattccctttcatagagcaggtttgaaacactcgttctggagtatctggatgtggacatttggagcgctttgatgcctacggtggaaaagtaaatatcttcccataaaaacgagacagaaagattctcagaaacaagtttgtgatgtgtgtactcagctaacagagtggaacctttctttttacagagcagctttgaaactctatttttgtggattctgcaaattgatatttagattgctttaacgatatcgttggaaaagggaatatcgtcatacaaaatctagacagaagcattctcacaaacttctttgtgatgtgtgtcctcaactaacagagttgaacctttcttttgatgcagcaatttggaaacacccttttggtagaaactgtaactggatatttggatagctctaacgatttcgttggaaacgggaatatcatcatcaaaaggtagacagaagcactattagaaactacttggtgatatctgcattcaagtcacagagtagaacattcccttacttcgagcacgtttgaaacactcttttggaagaatctggaagtggacatttggagcgctttgatgcctttggtgaaaaggaaacgtcttccaataaaagccagacagaagcattctcagaaacttgttcgtgatatgtgtactcaactaaaagagttgaacctttctattgatagcgcagttttgaaacactctttttgtggattctgcaagtggatatttggattgctttgaggatttcgttggaagcgggaattcatataaaaactagacagcagcattcccagaaatttctttcggatatttccattcaactcatagagatgaacatggcctttcatagagcaggtttgaaacactctttttgtagtttgtggaagtggacgtttcgatcgccttgacgcctacggtgaaaaaggaaatatcttcccataaaaaatagacagaagcattctcagaaacttgttggtgatatgtgtcctcaactaacagagttgaactttgccattgatagagagcagttttgaaacactctttttgtggaatctgcaagtggatatttggatagcttggaggatttcgttggaagcgggaattcaaataaaaggtagacagcagcattctcagaaatttctttctgatgtctgcattcaactcatagagttgaacattccctttcatagagcaggtttgaaacactctttctggagtatctggatgtggacatttggagcgctttgatgcctacggtgaaaaagtaaatatcttcccataaaaagcgagacagaaggattctcagaaacaagtttgtgatgtgtgtactcagctaacagagtggaacctctcttttgatgcagcagtttggaaacactctttttgtagaaactgtaagtggatatttggatagctctaatgattccgttggaaacgggaatatcatcatctaaaatctagacagaagccctctcagaaactactttgtgatatctgcattcaagtcacagtagttgaacattcgctttcttagggcacgttggaaacactctttttgtagtgtctggaagtggacatttggagcgctttgatgcctttggtgaaaaagggaacgtcttcccataaaaactagacagaagcattctcagaaacttgtttgtgatgtgtgtacccagccaaaggagttgaacatttctattgatagagcagttttgaaacactcttgttgtggaaaatgcaggtggatatttggatagcttggaggatttcgttggaagcgggaattcaaataaaaggtagacagcagcattctcagaaatttctttctaatgtctgcattcaactcatagagttgaagattccctttcatagagcaggtttgaaacactctttctggagtatctggatgtggacatttggagcgctttgatgcctacggtgaaaaagtaaatatcttcccataaaaacgagacagaaggattctgagaaacaagtttgtgatgtgtgtactcagctaacagagtggaacctttctttttacagagcagctttgaaactctatttttgtggattctgcaaatggatatttagattgctttaatgatatcgctggaaaagggaatatggtcatacaaaatctagacagaagcattctcacaaacttctttgtgatgtgtgtcctcaactaacagagttgaacctttctttggatgcagcagtttggaaacactctttttgtagaaactgtaagtggatatttggatagctctaacgatttcgttggaaacgggaatatcatcatctaaaatctagacagaagcactattagaaactacttggtgatatctgcattcaagtcacagagttgaacattcccttactttgagcacgtttcaaacactcttttggaagaatctggaagtggacatttggagcgctttgatgcctttggtgaaaaggaaacgtcttccaataaaagccagacagaagcattctcagaaacttgttcgtgatgtgtgtactcaactaaaagagttgaacctttctattgatagagcagttttgaaacactctttttgtggattctgcaagtggatatttggattgctttgaggatttcgttgaaagcgggaattcgtataaacactagacagcagcattcccagaaatttctttcggatatttccattcaactcatagagatgaacatggcctttcatagagcaggtttgaaacactctttttgtagtttgtggaagtggacatttcgatcgccttgacgcctacggtgaaaaaggaaatatcttcccataaaaaatagacagaagcattctcagaaacttgttggtgatatgtgtcctcaactaacagagttgaactttgccattgatagagagcagttttgaaacactctttttgtggaatctgcaagtggatatttggatagcttggaggatttcgttggaagcgggaattcaaataaaaggtagacagcagcattctcagaaaatttctttctgatgtctgcattcaactcatagagttgaagattccctttcatagagcaggtttgaaacactctttctggagtatctggatgtggacatttggagcgctttgatacctacggtgtaaaagtaaatatcttcccataaaaacgagacagaaggattctgagaaacaagtttgtgatgtgtgtactcagctaacagagtggaacctctcttttgatgcagcagtttggaaacactctttttgtagaaactgtaagtggatatttggatagctctaatgatttcgttggaaacgggaatatcatcatctaaaatctagacagaagccctctcagaaactactttttgatatctgcattcaagtcacagagttgaacattcgctttcttagagcacgtttgaaacactctttttgtagtgtctggaagtggacatttggagcgctttgatgcctttggtgaaaaagggaacgtcttcccataaaaactagacagaagcattctcagaaacttgtttgtgatgtgtgtacccagctaaaggagttgaacatttctattgatagagcagttttgaaacactctttttgtggaaaatgcaagtggatatttggatagcttggaggatttcgttggaagcggcaattcaaataaaaggtagacagcagcattctcagaaatttctttctgatgtctgcattcaactcatagagttgaagattccctttcatagagcaggtttgaaacactctttctggagtatctggatgtggacatttggagcgctttgatgcctacggtgaaaaagtaaatatcttcccataaaaacgagacagaaggattctgagagacaagtttgtgatgtgtgtactcagctaacagagtggaacttttctttttacagagcagctttgaaactctatttttgtggattctgcaaatggatatttagattgctttaacgatatcgttggaaaagggaatatcgtcatacaaaatctggacagaagcattctcacaaacttctttgtgatgtgtgtcctcaactaacagagttgaacctttcttttgatgcagcagtttggaaacactctttttgtagaaactgtaagtggatatttggatagctctaacgatttcattggaaacgggaatatcatcatctaaaatctagacagaagcactattagaaactacttggtgatatctgcattcaagtcacagatttgaacattcccttactttgagcacgtttgaaacactcttttggaagaatctggaagtggacatttggagcgctttgatgcctttggtgaaaaggaaacgtcttccagtaaaagccagacagaagcattctcagaaacttctttgtgatgtgtgtactcaactaaaagagttgaacctttctattgatagagcagttttgaaacactctttttgtggattctgcaagtggatatttggattgctttgaggatttcgttggaagcgggaattcgtataaaaactagacagcagcattcccagaaatttctttcggatatttccattcaactcatagagatgaacatggcctttcatagagcaggtttgaaacacactttttgtagtttgtggaagtggacatttcgatcgccttgacgcctacggtgaaaaaggaaatatcttcccataaaaaatagacagaagcattctcagaaacttgttggtgatatgtgtcctcaactaacagagttgaactttgccattgatagagagcagttttgaaacactctttttgtggaatctgcaagtggatatttggatagcttggaggatttcgttggaagcgggaattcaaataaaaggtagacagccagcattctcagaaatttctttctgatgtctgcattcaactcatagagttgaagattccctttcatagagcaggtttgaaacactctttctggagtatctggatgtggacatttggagcgctttgatgcctacggtgaaaaagtaaatatcttcccataaaaacgagacagaggattctgagaaacaagtttgtgatgtgtgtactcagctaacagagtggaacctctcttttgatgcagcagtttggaaacactctttttgtagaaactgtaagtggatatttggatagctctaatgatttcgttggaaacgggaatatcatcatctaaaatctagacagaagcactctcagaaactactttgtgatatctgcattcaagtcacagagttgaacattcgctttcttagagcacgtttgaaacactctttttgtagtgtctggaagtggacatttggagcgctttgataactttggtgaaaaagggaatgtcttcccataaaaactagacagaagcattctcagaaacttgtttgtgatgtgtgtacccagccaaaggagttgaacatttctattgatagagcagttttgaaacactcttgttgtggaaaatgcaagtggatatttggatagcttggaggatttcgttggaagcgggaattcaaataaaaggtagacagcagcattctcagaaatttctttctgatgtctgcattcaactcatagagttgaagattccctttcatagagcaggtttgaaacactcgttctggagtatctggatgtggacatttggagcgctttgatgcctacggtggaaaagtaaatctcttcccataaaaacgagacagaaggattctgagaaacaagtttgtgatgtgtgtactcagctaacagagtggaacctttctttttacagagcagctttgaaactctatttttgtggattctgcaaattggtatttagattgctttaacgatatcgttggaaaagggaatatcgtcatacaaaatctagacagaagcattctcacaaacttctttgtgatgtgtgtcctcaactaacagagttgaacctttcttttgatgcagcaatttggaagcacccttttggtagaaactgtaactggatatttggatagctactaacgatttcgttggaaacgggaatatcatcatctaaaatgtagacagaagcactattagaaactacttggtgatatctgcattcaagtcacagagttgaacattcccttactttgagcacgtttcaaacactcttttggaagaatctggaagtggacatttggagcgctttgatgcctttggtgaaaaggaaacgtcttccaataaaagccagacagaagcattctcagaaacttgtttgtgatgtgtgtactcaactaaaagagttgaacctttctattgatagagcagttttgaaacactctttttgtggattctgcaagtggatatttggattgctttgaggatttcgttggaagcgggaattcatataaaaactagacagcagcattcccagaaatttctttcggatatttccattcaactcatagagattaacatggcctttcatagagcaggtttgaaacactctttttgtagtttgtggaagtggacatttcgatcgccttgacgcctacggtgaaaaaggaaatatcttcccataaaaaatagacagaagcattctcagaaacttgttggtgatatgtgtcctcaactaacagagttgaactttgccattgagagagcagttttgaaacactctttttgtggaatctgcaagtggatatttggatagcttggaggatttcgttggaagcgggaattcaaataaaaggtagacagcagcattctcagaaatttctttctgatgtctgcattcaactcatagagttgaacattccctttcatagagcaggtttgaaacactctttctggagtatctggatgtggacatttggagcgctttgatgcctacggtgaaaaagtaaatatcttcccataaaaacgagacagaaggattctgagaaacaagtttgtgatgtgtgtactcagctaacagagtggaacctctcttttgatgcagcagtttggaaacactctttttgtagaaactgtaagtggatatttggatagctctaatgatttccttggaaacgggaatatcatcatctaaaatctagacagaagccctctcagaaactactttgtgatatctgcattcaagtcacagagttgaacattcgctttcttagagcacgtttgaaacactctttttgtagtgtctggaagtggacatttggagcgctttgatggctttggtgaaaaagggaacgtcttcccataaaaactagacagaagcattctcagaaacttgtttgtgatgtgtgtacccagccaaaggagttgaacatttcttttgatagcgcagttttgaaacactctttttgtggattctgcaagtggatatttggattgctttgaagatttcgttggaagcgggaattcgtataaacactagacagcagcattctcagaaaatttctttctgatgtctgcattcaactcatagagttgaagattccctttcatagagcaggtttgaaacactctttctggagtatctggatgtggacatttggagcgctttgatgcctacggtgaaaaagtaaatatcttcccataaaaacgagacagaaggattctcagaaacaagtttgtgatgtgtgtactcagctaacagagtggaacctttctttttacagagcagctttgaaactctatttttgtggattctgcaaattgatatttagattgctttaacgatattgttggaaaagggaatatcgtcatacaaaatctagacagaagcattctcacaaacttctttgtgatgtgtgtcctcaacttacagagttgaacctttcttttgatgcagcagtttggaaacactctttttgtagaaactgtaagtggatatttggatagctctaacgatttcgttggaaacgggaatatcatcatctaaaatctagacagaagcactattagaaactacttggtgatatctgcattcaagtcacagagtagaacattcccttacttcgaccacgtttgaaacactcttttggaagaatctggaagtggacatttggagcgctttgatgcctttggtgaaaaggaaacgtcttccaataaaagccagacagaagcattctcagaaacttgtttgtgatgtgtgtactcaactaaaagagttgaacctttctattgatagagcagttttgaaacactctttttgtggattctgcaagtggatatttggattgctttgaggatttcgttggaagcgggaattcgtataaaaactagacagcagcattcccagaaatttctttcggatatttccattcgactcatagagatgaacatggcctttcatagagcaggtttgaaacactctttttgtagtttgtggaagtggacatttcgatcgccttgacgcctacggtgaaaaaggaaatatcttcccataaaaaatagacagaagcattctcagaaacttgttggtgatatgtgtcctcaactaacagagttgaactttgccattgatagagagcagttttgaaacactctttttgtggaatctgcaagtggatatttggatagcttggaggatttcgttggaagcgggaattcaaataaaaggtagacagcagcattctcaggaaatttctttctgatgtctgcattcaactcatagagttgaagattccctttcatagagcaggtttgaaacactctttgtggagtatctggatgtggacatttggagcgctttgatgcctacggtgaaaaagtaaatatcttcccataaaaacgagacagaaggattctgagaaacaagtttgtgatgtgtgtactcagctaacagagtggaacctctgttttgattcagcagtttggaaacactctttttgtagaaactgtaagtggatatttggatagctctaatgatttcgttggaaaagggaatatcatcatctaaaatctagacagaagccctctcagaaactactttgtgatatctgcattcaactcacagagttgaacattcggtttcttagagcacgtttgaaacactctttttgtagtgtctggaagtggacatttggagcgctttgatgcctttggtgaaaaagggaatgtcttcccataaaaactagacagaagcattctcagaaacttgtttgtgatgtgtgtacccagccaaaggagttgaacatttctattgatagagcagttttgaaacgctctttttgtggaaaatgcaggtggatatttggatagcttggaggatttcgttggaagcgggaattcaaataaaaggtagacagcaggattctcagaaacaagtttgtgatgtgtgtactcagctaacagagtggaacctttctttttacagagcagctttgaaactctatttttgtggattctgcaaattgatatttagattgctttaatgatatcgttggaaaagggaatatggtcatacaaaatctagacagaagcattctcacaaacttctttgtgatgtgtgtcctcaactaacagagttgaacctttcttttgatgcagcagtttggaaacgctctttttgtagaaactgtaagtggatatttggatagctctaacgattttgttggaaacgggaatatcattatctaaaatctagacagaagcactctcagaaactactttttgatatctgcattcaagtcatagagttgaacattcgctttcttagagcacttttgaaacactctttttgtagtatctggaattggacatttggagctctttgatgcctttggtgaaaaaggaaatgtcatcccataaaaactagacagaagcattctcagaaacttgtttgtgatgtgtgtacctcaactaaaagagttgaacctttctattgatagagcagttttgaaacactctttttgtggattctgcaagtggatatttggattgctttgaggatttcgttggaagcgggaattcatataaaaactagacagcagaaatctcagaaacttgtttgtgatgtgtatcctcaactgacagagttgaaccttgccattgatagagcagttttgaaacactctttttgtggaatctgcaaggggatatttggatagcctggaggatttcgttggaagcgggaattcaaataaaaggtagacagcagcattctcagaaacttgttggtgatatgtgtcctcaactaacagagttgaactttgccattgatagagagcagttttgaaacactctttttgtggaatctgcaagtggatatttggatagcttggaggatttcgttggaagcgggaattcaaataaaaggtagacagcagagcattctcagaaatttctttctgatgtctgcattcaactcatagagttgaagattccctttcatagagcacgtttgaaacactctttctggagtatctggatgtggacatttggagcgctttgatgcctacggtgagaaagtaaatatcttcccataaaaacgagacagaaggattctgagaaacaagtttgtgatgtgtatactcagctaacagagtggaacctctcttttgatgcagcagtttggaaacactctttttgtagaaactgtaagtggatatttggatagctctaatgatttcgttggaaacgggaatatcatcatctaaaatctagacagaagccctctcagaaactactttgtgatatctgcatgcaagtcacagagttgaacattcgctttcttagagcacgttggaaacactctttttgtagtgtctggaagtggacatttggagcgctttgatgcctttggtgaaaaagggaatgtcttcccataaaaactagacagaagcattctcagaaacttgtttgtgatgtgtgtacccagccaaaggagttgaccatttctattgatagagcagttttgaaacactcttgttgtggaaaatgcaggtggatatttggatagcttggaggatttctttggaagcgggaattcaaataaaaggtacacagcagcattctcagaaatttctttctgatgtctgcattcaactcatagagttgaagattccctttcatagagcaggtttgaaacagtctttctggagtatctggatgtggacatttggagcgctttgatgcctacggtgaaaaagtaactatcttcccataaaaacgagacagaaggattctcagaaacaagtttgtgatgtgtgtactcagctaacagagtggaacctttctttttacagagcagctttgaaactctatttttgtggattctgcaaattgatatttagtttgctttaacgatatcgttggaaaagggaatatcgtcatacaaaatctagacagaagcattctcacaaacttctttgtgatgtgtgtcctcaactaacagagttgaacctttcttttgatgcagcagtttggaaacacccttttggtagaaactgtaactggatatttggatagctctaacgatttcgttggaaacgggaatatcatcatctaaaatctagacagaagcactattagaaactacttggtgatatctgcattcaagtcaaagagttgaacattcccttactttgagcacgtttgaaacactcttttggaagaatctggaagtggacatttggtgcgctttgatgcctttggtgaaaaggaaacgtcttccaataaaagccagacagaagcattctcagaaacttgttcttgatgtgtgtactcaactaaaagagttgaacctttctattgatagagcagttttgaaacactctttttgtggattctgcaagtggatatttggattgctttgaggatttcgttggaagcgggaattcgtataacaactagacagcagcattcccagaaatttctttcggatatttccattcaactcatagagatgaacatggcctttcatagagcaggtttgaaacactctttttgtagtttgtggaagtggacatttcgatcgccttgacgcctacggtgaaaaaggaaatatcttcccataaaaaatagacagaagcattctcagaaacttgttggtgatatgtgtcctcaactaacagagttgaactttgccattgatagcagttttgaaacactctttttgtggaatctgcaagtggatatttggatagcttggaggatttcgttggaagcgggaattcaaataaaaggtagacagcagcattctcagaaatttctttgtgatgtttgcattcaactcatagagttgaacattccctttcatagagcaggtttgaaacactctttctgtactatctggatgtggacatttggaacgctttgatgcctacggtgaaaaagtaaatatcttcccataaaagctagacagaaggattctgagaaacaagtttgtgatgtgtgtactcagctaacagagtggaacctctcttttgatgcagcagttaggaaacactctttttgtagaaactgtaagtggatatttggatagctctaatgatttcgttggaaacgggaatatcatcatctaaaatctagacagaagccctctcagaaactactttgtgatatctgcattcaagtcacagagttgaacattcgctttcttagagcacgttggaaacactctttttgtagtgtctggaagtggacatttggagcgctttgatgcctttggtgaaaaagggaacgtcttcccataaaaactagacagaaagcattctcagaaacttgtttgtgatgtgtgtacccagctaaaggagatgaacatttctattgatagagcagttttgaaacactctttttgtggaaaatgcaagtggatatttggatagcttggaggatttcgttggaagcgggaattcaaataaaaggtagacagcagcattctcagaaatttctttctgatgtctgcattcaactcatagagttgaagattccctttcatagagcaggtttgaaacactgtttctggagtatctggatgtggacatttggagcgctttgatgcctacggtgaaaaagtaaatatcttcccataaaaacgagacagaaggattctcagaaacaagtttgtaatgtgtgtactcagctaacagagtggaacctttctttttacagagcagctttgaaactctatttttgtggattctgcaaatggatatttagattgctttaacgatatcgttggaaaagggaatatcgtcatacaaaatctggacagaagcattctcacaaacttctttgtgatgtgtgtcctcaactaacagagttgaacctttcttttgatgcagcaatttggaaacacccttttggtagaaactgtaactggatatttggatagctctaacgatttcgttggaaacgggaatatcatcatctaaaatgtagacagaagcactattagaaactacttggtgatatctgcattcaagtcacagagttgaacattcgctttcttagagcacgtttgaaacactctttttgtagtgtctggaagtggacatttggagcgctttgatgcctttggtgaaaaagggaacgtcttcccataaaaactagacagaagcattctcagaaacttgtttgtgatgtgtgtactcaactaaaagagttgaacctttctattgaaagagcagttttgaaacactctttttgtggattctgcaagtggatatttggattgctttgaggatttcgttggaagcgggaattcgtataaaaactagacagcagcattcccaggaaatttctttcggatatttccattcgactcatagagatgaacatggcctttcatagagcaggtttgaaacactctttttgtagtttgtggaagtggacatttcgatcgccttgacgcctacggtgaaaaaggaaatatcttcccataaaaaatagacagaagcattctcagaaacttcttggtgatatgtgtcctcaactaacagagttgaactttgccattgatagagagcagttttgaaacactctttttgtggaatctgcaagtggatatttggatagcttggaggatttcgttggaagcgggaattcaaattaaaggtagacagcagcattctcagtaaatttctttctgatgtctgcattcaactcatagagttgaagattccctttcatagagcaggtttgaaacactcgttctggagtatctggatgtggacatttggagcgctttgatgcctacggtggaaaagtaaatatcttcccataaaaacgagacagaaggattctcagaaacaagtttgtgatgtgtgtactcagctaacggagtggaacctttctttttacagagcagctttgaaactctatttttctggattctgcaaattgatatttagattgctttaacgatatcgttggaaaagggaatatcgtcatacaaaatctagacagaagcactctcagaaactactttgtgatatctgcattcaagtcacagagttgaacattcgctttcttagagcacgtttgaaacactctttttgtagtgtctggaagtggacatttggagcgctttgattcctttggtgaaaaagggaatgtctacccataaaaactagacagaagcattctcagaaacttgtttgtgatgtgtgtacccagccaaaggagttgaacatttctattgatagagcagttttgaaacgctctttttgtggaaaatgcaggtggatatttggatagcttggaggatttcgttggaagcgggaattcaaataaaaggtagacaggagcattctcagaaattactttctgatgtctgcattcaactcatagagttgaagattccctttcatagagcaggtgtgaaacactctttctgtagtatctggatgtggacatttgttgcgctttgatacctactgtgaaaaagtaaatatcttcccataaaaactagacagaaggattctcagaaacaagtttgtgatgtgtgtactcagctaacagagtggatactttcttcttacagagcagctttgaaactctatttctgtggattctgcaaattgatatttgggttgatttagcgacatcgttggaaaagggaatatcttcatacaaaatccagacagaaagcattctcacaaacttctttgtgatgtgtgtcctcaactaacagagttgaacttttcttttgatgcagcagtttggaaacactgtttttgtagaaactgtaagtggatatttggatagctctaacgatttcgttggaaacgggaatatcatcatctaaaatctagacagaagcactattagaaactacttggtgatatctgcattcaagtcacagagtagaacattcccttacttcgagcacgtttgaaacactcttttggaagaatctggaagtggacatttggagcgctttgatgtctttggtgaaaaggaaacgtcttccaataaaagccagacagaagcattctcagtaaacttgttggtgatgtgtgtactcaactaaaagagttgaacctttctattgatagagcagttttgaaacactctttttgtggattctgcaagtggatatttggattgctttgaggatttcgttggaagcgggaattcgtataaacactagacagcagcattcccagaaatttctttcggatatttccattcaactcatagagatgaacatggcctttcatagagcaggtttgaaacactctttttgtagtttgtggaagtggacatttcgatcgccttgacgcctacggtgaaaaaggaaatatcttcccataaaaaatagacagaagcattctcagaaacttgttggtgatatgtgtcctcaactaacagagttgaactttgccattgatagagagcagttttgaaacactctttttgtggaatctgcaagtggatatttggatagcttggaggatttcgttggaagcgggaattcaaataaaaggtagacagcagcattctcagaaatttctttctgatgtctgcattcaactcatagagttgagcattccctttcatagggcaggtttgaaatactctttctgtagtatctggttgtggacatttggagcgctttgatgcctacggtgaaaaagtaaatatcttcccataaaaacgagacagaaggattctgagaaacaagtttgtgatgtgtgtactcagctaacagagtggaacctctcttttgatgcagtagtttggaaacactctttttgtagaaactgtaagtggatatttggatagctctaatgatttcgttggaaacgggaatatcatcatctaaaatctagacagaagcactctcagaaactactttgtgatatctgcattcaagtcacagagttgaacattcgctttcttagagcacgtttgaaacactctttttgtagtgtctggaagtggacatttggagtgctttgattcctttggtgaaaaagggaatgtctacccataaaaactagacagaagcattctcagaaacttgtttgtgatgtgtgtacccagctaaaggagttgaacgtttctattgatagagcagttttgaaacactctttttgtggaaaatgctagtggatatttcgatagcttggaggatttccttggaagcgggaattcaaataaaaggtagacagcagcattctcagaaatttctttctgatgtctgcattcaactcatagagttgaagattccctttcatagagcaggtttgaaacactcgttctggagtatctggatgtggacatttggagcgctttgatgcctacggtggaaaagtaaatatcttcccataaaaacgagacagaaggattctcagaaacaagtttgtgatgtgtgtactcagctaacagagtggaacctttctttttacagagcagctttgaaactctatttttgtggattctgcaaatggatatttagattgctttaacgatatcgttggaaaagagaatatcgtcatacaaaatctggacagaagcattctcacaaacttctttgtgacgtgtgtcctcaactaacagagttgaacctttcttttgatgcagcagtttggaaacactgtttttgtagcaactgtaagtggatatttggatagctctaacgatttcgttggaaacgggaatatcatcatctaaaatctagacagaagcactattagaaactacttggtgatatctgcattcaagtcacagagtggaacattcccttactttgagcacgtttcaaacactcttttggaagaatctggaagtggacatttggagcgctttgatgcctttggtgaaaaggaaacgtcttccaataaaagccagacagaagcattctcagaaacttgtttgtgatgtgtgtactcaactaaaagagttgaacctttctattgatagagcagttttgaaacactctttttgtggattctgcaagtggatatttggattgctttgaggatttcgttggaagcgggaattcgtataaaaactagacagcagcattcccagaaatttctttcggatatttccattcaactcatagagatgaacatcgcctttcatagagcacgtttgaaacactctttttgtagtttgtggaagtggacatttggatcgccttgacgcctacggtgaaaaaggaaatatcttcccataaaaaatagacagaagcattctcagaaacttgttggtgatatgtgtcctcaactaacagagttgaactttgccattgatagagagcagttttgaaacactctttttgtggaatctgcaagtggatatttggatagcttggaggattttgttggaagcgggaattcaaataaaaggtagacagcagcattctcagaaatttctttctgatgtctgcattcaactcatagagttgaagattccctttcatagagcaggtttgaaacactctttctggagtatctggatgtggacatttggagcgctttgatgcctacggtgaaaaagtaaatatcttcccataaaaacgagacagaaggattctgagaaacaagtttgtgatgtgtgtactcagctaacagagtggaacctctcttttgatgcagcagtttggaaacactctttttgtagaaactgtaagtggatatttggatagctctaatgatttcgttggaaacgggaatatcatcatctaaaatctagacagaagccctctcagaaactactttgtgatatctgcattcaagtcacagagttgaacattcactttcttagagcacgtttgaaacactctttttgtagtgtctggaagtggacatttggagcgctttgatgcctttggtgaaaaagggaacgtcttcccataaaaactagacagaagcattctcagaaacttgtttgtgatgtgtgtacccagccaaaggagttgaacatttctattgatagagcagttttgaaacactctttttgtggaaaatgcaggtggatatttggatagcttggaggatttcgttggaagcgggaattcaaataaaaggtagacagcagcattctcagaaatttctttctgatgtctgcattcaactcatagagttgaacattcccctttcatagagcaggtttgaaacactctttctggagtatctggatgtggacatttggagccctttgatgcctacggtgaaaaagtaaatatcttcccataaaaacgagacagaaggattctgagagacaagtttgtgatgtgtgtactcagctaacagagtggaacctttctttttacagagcagctttgaaactctatttttgtggattctgcaaatggatatttagattgctttaatgatatcgttggaaaagggaatatcgtcatacaaaatctggacagaagcattctcacaaacttctttgtgatgtgtgtcctcaactaacagagttgaacctttcttttgatgcagcaatttggaaacacccttttggtagaaactgtaactggatatttggatagctctaacgatttcgttggaaacgggaatatcatcatctaaaatgtagacagaagcactattagaaactacttggtgatatctgcattcaagtcacagagttgaacattcccttactttcgagcacgtttgaaacactcttttggaagaatctggaagtggacatttggagcgctttgatgcctttggtgaaaaggaaacgtcttccaataaaagccagacagaagcattctcagaaacttgtttgtgatgtgtgtactcaactaaaagagttgaacctttctattgatagagcagttttgaaacactctttttgtggattctgcaagtggatatttggattgctttgaggatttcgttggaagcgggaattcatataataactagacagcagcattaccagaaatttctttcggatatttccattcaactcatagagaagaacatggcctttcatagagcaggtttgaaacactctttttgtagtttgtggaagtggacatttcgatcaccttgacgcctacggtgaaaaaggaaatatcttcccataaaaaatagacagaagcattctcagaaacttgttggtgatatgtgtcctcaactaacagagttgaactttgccattgatagagagcagttttgaaacactctttttgtggaatatgcaagtggatatttggatagcttggaggatttcgttggaagcgggaattcaaataaaaggtagacagcaagcattctcagaaatttctttgtgatgcttgcattcaactcatagagttgaacattccctttcatacagcaggtttgaaacactctttctgtactatctgcatgtggacatttggaactctttgatgcctacggtgaaaaagtaaatatcttcccataaaaactagacagaaggattctgagaaacaagtttgtgatgtgtgtactcagctaacagaggtggaacccctcttttgatgcagcagtttggaaacactctttttgtagaaactgtaagtggatatttggatagctctaatgatttcgttggaaacgggaatatcatcatctaaaatctagacagaagcactattagaaactacttggtgatatctgcattcaagtcacagagttgaacattcccttacttcgaccacgtttgaaacactctttttgtagtgtctggaagtggacatttggagcgctttgatgcctttggtgaaaaagggaatgtcttcccataaaaactagacagaagcattctcagaaacttgtttgtgatgtgtgtacccagccaaaggagttgaacatttctattgatagagcagttttgaaacactctttttgtggaaaatgcaggtggatatttggatagcttggaggatttcgttggaagagggaattcaaataaaaggtagacagcagcattctcagaaatttctttctgatgtctgcattcaactcatagagttgaagattccctttcatagagcaggtttgaaacactctttctggagtatctggatgtggacatttggagcgctttgatgcctacggtgaaaaagtaaatatcttcccataaaaacgagacagaaggattctcagaaacaagtttgtgatgtgtgtactcagctaacagagtggaacctttctttttacagagcagctttgaaactctagttttgtggattctgcaaattgatatttagattgctttaacgatatcgttggaaaagggaatatcgtcatacaaaatctagacagaagcattctcacaaacttctttgtgatgtgtgtcctcaactaacagagttgaacctttcttttgatgcagcaatttggaaacacccttttggtagaaactgtaactggatatttggatagctctaacgatttcgttggaaacgggaatatcatcatctaaaatgtagacagaagcactattagaaactacttggtgatatctgcattcaagtcacagagtagaacattcccttacttcgagcacgtttgaaacactcttttggaagaatctggaagtggacatttggagcgctttgatgcctttggtgaaaaggaaacgtcttccaataaaagccagacagaagcattctcagaaacttgtttgtgatgtgtgtactcaactaaaagagttgaacctttctattgatagagcagttttgaaacactctttttgtggattctgcaagtggatatttggattgctttgaggatttcgttggaagcgggaattcgtataaaaactagacagcagcattcccagaaatttctttcagatatttccattcgactcatagagatgaacatggcctttcatagagcaggtttgaaacactctttttgtagtttgtggaagtggacatttcgatcgccttgacgcctacggtgaaaaaggaaatatcttcccataaaaaatagacagaagcattctcagaaacttgttggtgatatgtgtcctcaactaacagagttgaactttgccattgatagagagcagttttgaaacactctttttcctgaatctgcaagtggatatttggatagtttggaggatttcgttggaagcgggaattcaaataaaaggtagacagcaggattctgagaaacaagtttgtgatgtgtgtactcagctaacagagtggaacctctgttttgatacagcagtttggaaacactctttttgtagaaactgtaagtggatatttggatagctctaatgatttcgttggaaaagggaatatcatcatctaaaatctagacagaagccctctcagaaactactttgtgatatctgcattcaagtcacagagttgaacattcgctttcttagagcacgttggaaacactctttttgtagtgtctggaagtggacatttggagcgctttgatgcctttggtgaaaaagagaatgtcttcccataaaaactagacagaagcattctcagaaacttgtttgtgatgtgtgtacccagccaaaggagttgaacatttctattgatagagcagttttgaaacgctctttttgtggaaaatgcaggtggatatttggatagcttggaggatttcgttggaagcgggaattcaaataaaaggtagacagcagcattctcagaaatttctttctgatgtctgcattcaactcatagagttgaagattccctttcatagagcaggtttgaaacagtctttctggagtatctggatgtggacatttggagtgctttgatgcctacggtgaaaatgtaaatatcttcccataaaaacgagacagaaggattctgagaaacaagtttgtgatgtgtgtactcagctaacagagtggaacctttctttttacagagcagctttgaaactctatttttgtggattctgcaaatggatatttagattgctttaacgatatcgctggaaaagggaatatcgtcatacaaaatctagacagaagcattctcacaaacttctttgtgatgtgtgtcctcaactaacagagttgaacctttcttttgatgcagcaatttggaaacacccttttggtagaaactgtaactggatatttggatagctctaacgatttcgttggaaacgggaatatcatcatctaaaatctagacagaagcactattagaaactacttggtgatatctgcattcaagtcacagagttgaacattcccttactttgagcacgtttgaaacactcttttggaagaatctggaagtggacatttggagcgctttgatgatgcctttggtgaaaaggaaacgtcttccaataaaagccagacagaagcattctcagaaacttgtttgtgatgtgtgtactcaactaaaagagttgaacctttctattgatagagcagttttgaaacactctttttgtggattctgcaagtggatatttggattgctttgaggatttcgttgtaagcgggaattcgtataaaaactagacagcagcattcccagaaatttctttcggatatttccattcgactcatagagatgaacatggcctttcatagagcaggtttgaaacactctttttgtagtttgtggaagtggacatttcgatcgccttgacgcctacggtgaaaaaggaaatatcttcccataaaaaatagacagaagcattctcagaaacttgttggtgatatgtgtcctcaactaacagagttgaactttgccattgatagagagcagttttgaaacactctttttgtggaatctgcaagtggatatttggatagcttggaggatttcgttggaagcgggaattcaaataaaaggtagacagcaggattctcagaaacaagtttgtgatgtgtgtactcagctaacagagtggaacctctcttttgatgcagcagtttggaaacactctttttgtagaaactgtaagtggatatttggatagctctaatgatttcgttggaaaccggaatatcatcatctaaaatctagacagaagccctctcagaaactactttgtgatatctgcattcaagtcacagagttgaacattcgctttcttagagcacgtttgaaacactctttttgtagtgtctggaagtggacatttggagcgctttgatgtctttggggaaaaagggaatgtcttcccataaaaactagacagaagcattctcagaaacttgtttgtgatgtgtgtacccagccaaaggagttgaacatttctattgatagagcagttttgaaacactctttttgtggaaaatgcaggtggatatttggatagcttggaggatttcgttggaagcgggaattcaaataaaaggtagacagcaggattctcagaaacaagtttgtgatgtgtgtactcagctaacagagtggaacctttctttttacagagcagctttgaaactctatttttgtggattctgcaaattgatatttagattgctttaacgatatcgttggaaaagggaatatcgtcatacaaaatctagacagaagcattctcacaaacttctttgtgatgtgtttcctcaactaacagagttgaacctttcttttgatgcagcaatttggaaacacccttttggtagaaactgtaactggatatttggatagctctaacgattttgttggaaacgggaatatcatcatctaaaatctagacagaagcactattagaaactacttggtgatatctgcattcaagtcacagagttgaacattcccttactttgagcacgtttcaaacactcttttggaagaatctggaagtggacatttggagcgctttgatgcctttggtgaaaaggaaacgtcttccaataaaagccagacagaagcattctcagaaacttgtttgtgatgtgtgtactcaactaaaagagttgaacctttctattgatagagcagttttgaaacactctttttgtggattctgcaagtggatatttggattgctttgaggatttcgttggaagcgggaattcgtataacaactagacagcagcattcccagaaatttctttcggatatttccattcaactcatagagatgaacatggcctttcatagagcaggtttgaaacactcttttttgtagtttgtggaagtggacatttcgatcgccttgacgcctacggtgaaaaaggaaatatctacccataaaaaatagacagaagcattctcagaaacttgttggcgatatgtgtcctcaactaacagagttgaactttgccattgatagagagcagttttgaaacactctttttcctgaatctgcaagtggatatttggatagcttggaggatttcgttggaagcgggaattcaaataaaaggtagacagcagcattctcagaaatttctttctgatgtctgcattcaactcatagagttgaagattccctttcatagagcaggtttgaaacactctttctggagtatctggatgtggacatttggagcgctttgatgcctacggtgaaaaagtaaatatcttcccagaaaaacgagacagaaggattctcagaaacaagtttgtgatgtgtgtactcagctaacagagtggaacctctcttctgatgcaacagtttggaaacactctttttgtagaaactgtaagtggatatttggatagctctaatgatttcgttggaaacgggaatatcatcatctaaaatctagacagaagccctctcagaaactactttgtgatatctgcattcaagtcacagagttgaacattcgctttcttagagcacgtttgaaacactctttttgcagtgtctggaagtggacatttggagcgctttgatgcctttggtgaaaaagggaatgtcttcccataaaaactagacagaagcattctcagaaacttgtttgtgatgtgtgtacccagccaaaggagttgaacatttctattgatagagcagttttgaaacactcttgttgtggaaaatgcaggtggatatttggatagcttgggggatttcgttggaagcgggaattcaaataaaaggtagacagcagcattctcagaaatttctttctgatgtctgcattcaactcatagagttgaagattccctttcatagagcaggtttgaaacactcgttctggagtatctggatgtggacatttggagcgctttgatgcctacggtggaaaagtaaatatcttcccataaaaacgagacagaaggattctcagaaacaagtttgtgatgtgtgtactcagctaacagagtggaacctttctttttacagagcagctttgaaactctatttttgtggattctgcaaattgatatttagattgctttaacgatatcattggaaaagggaatatggtcatacaaaatctagacagaagcattctcacaaacttctttgtgatgtgtgtcctcaactaacagagttgaacctttcttttgatgcagcaatttggaaacacccttttggtagaaactgtaactggatatttggatagctctaacgatttcgttggaaacgggaatatcatcatctaaaatgtagacagaagcactattagaaactacttggtgatatctgcattcaagtcacagagtagaacattcccttacttcgagcacgtttgaaacactcttttggaagaatctggaagtggacatttggagcgctttgatgcctttggtgaaaaggaaacgtcttccaataaaagccagaaagaagcattctcagaaacttgttcgtgatgtgtgtactcaactaaaagagttgaacctttctattgatagagcagttttgaaacactctttttgtggattctgcaagtggatatttggattgctttgaggatttcgttggaagcgggaattcgtataagcactagacagcagcattcccagaaatttctttcggatatttccattcaactcatagagatgaacatggcctttcatagagcaggtttgaaacactctttttgtagtttgtggaagtggacatttcgatcgccttgacgcctacggtgaaaaaggaaatatcttcccataaaaaatagacagaagcattctcagaaacttgttggtgatatgtgtcctcaactaacagagttgaactttgccattgatagagagcagttttgaaacactctttttgtggaatctgcaagcggatatttggatagcttggaggatttcgttggaagcgggaattcaaataaaaggtagacagcagcattctcagaaatttctttctgatgtctgcattcaactcatagagttgaacattccctttcatagggcaggtttgaaatactctttctgtagtatctggatgtggacatttggagcgctttgatgcctacggtgaaaaagtaaatatcttcccataaaaacgagacagaaggattctgagaaacaagtttgtgatgtgtgtactcagctaacagagtggaacctctgttttgatgcagcagtttggaaacactctttttgtagaaactgtaagtggatatttggatagctctaatgatttctttggaaacgggaatatcatcatctaaaatctagacagaagcactctcagaaactactttgtgatatctgcactcaagtcacagagttgaacattcgctttcttagagcacgtttgaaacactctttttgtagtggctggaagtggacatttggagcgctttgatgcctttggtgaaaaagggaatgtcttcccataaaaactaggcagaagcattctcagaaacttgtttgtgatgtgtgtacccagccaaaggagttgaacatttctattgatacagcagttttgaaacactcttgttgtggaaaatgcaggtggatatttggatagcttggaggatttcgttggaagcgggaattcaaataaaagctagacagcagcattctcagaaatttctttctgatgtctgcattcaactcatagagttgaagattccctttcatagagcaggtttgaaacactcgttctggagtatctggatgtggacatttggagcgctttgatgcctacggtggaaaagtaaatatcttcccataaaaacgagacagaaggattctcagaaacaagtttgtgatgtgtgtactcagctaacagagtggaacctttcttttaacagagcagctttgaaactctagttttgtggattctgcaaattgatatttagattgctttaacgatatcgttggaaaagggaatatcctcatacaaaatctagacagaagcattctcacaaacttctttgtgatgtgtgtcctcaactaacagagttgaacctttcttttgatgcagcaatttggaaacacccttttggtagaaactgtaactggatatttggatagctctaacgatttcgttggaaacgggaatatcatcatctaaaatctagacagaagcactattagaaactacttggtgatatctgcattcaagtcacagagttgaacattcccttactttgagcacgtttgaaacactcttttggaagaatctggaagtggacatttggagcgctttcatgcctacggtggaaaagtaaatatcttcccataaaaacgagacagaagcattctcagaaacttgtttgtgatgtgtgtactcaactaaaagagttgaacctttctattgatagagcagttttgaaacactctttttgtggattctgcaagtggatatttggattgctttgaggatttcgttggaagcgggaattcgtataaaaactagacagcagcattcccagaaatttctttcggatatttccattcgactcatagagatgaacatggcctttcatagagcaggtttgaaacactctttttgtagtttgtggaagtggacatttcgatcgccttgacgcctacggtgaaaaaggaaattcttcccataaaaaatagacagaagcattctcagaaacttgttggtgatatgtgtcctcaactaacagagttgaactttgccattgatagagagcagttttgaaacactctttttgtggaatctgcaagtggatatttggatagcttggaggatttcgttggaagcgggaattcaaataaaaggtagacagcagcattctcagaaatttctttctgatgtctgcattcaactcatagagttgaagattccctttcatagagcaggtttgaaacactctttctggagtatctggatgtggacatttggagcgctttgatgcctacggtgaaaaagtaaatatcttcccataaaaacgagaaagaagcattctcacaaacttctttgtgatgtgtgtcctcaactaacagagttgaacctttcttttgattcagcagtttggaaacactctttttgtagaaactgtaagtggatatttggatagctctaacgatttcgttggaaacgggaatatcatcatctaaaatctagacagaagcactattagaaactactttgtgatatctgcattcaagtcacagaattgaacattcgctttcttagagcacgttggaaacactctttttgtagtgtctggaagtggacatttggagcgctttgatgcctttggtgaaaaagggaatgtcttcccataaaaactagacagaagcattctcagaaacttgtttgtgatgtgtgtacccagccaaaggagttgaacatttctattgatagagcaggtttgaaacactctttttgtggaaaatgcaggtggatatttggatagcttggaggatttcgttggaagcgggaattcaaataaaaggtagacagcagcattctcagaaatttctttctgatgtctgcattcaactcatagagttgaagattccctttcatagagcaggtttgaaacactcgttctggagtatctggatgtggacatttggagcgctttgatgcctacggtggaaaagtaaatatcttcccataaaaacgagacagaaggattctcagaaacaagtttgtgatgtgtgtactcagctaacagagtggaacctttctttttacagagcagctttgaaactctatttttgtggattctgcaaattgatatttaggttgccttaacgatatcgttggaaaagggaatatcgtcatacaaaatctagacagaagcattctcacaaacttctttgtgatgtgtgtcctcaactaacagagttgaacctttcttttgatgcagcagtttggaaacactctttttgtagaaactgtaagtggatatttggatagctctaacgatttcgttggaaacgggaatatcatcatctaaaatctagacagaagcactattagaaactacttggtgatatctgcattcaagtcacagagttgaacattcccttactttgagcacgtttgaaacactcttttggaagaatctggaagtggacatttggagcgctttgatgcctttggtgaaaaggaaacgtcttccaataaaagccagacagaagcattctcagaaacttgtttgtgatgtgtgtacccagccaaaggagttgaacatttctattgatagaacagttttgaaatactctttttgtggaaaatgcaggtggatatttggataccttggaggatttcgttggaagcgggaattcaaataaaaggtagacagccagcattcccaggaaatttctttcggatatttccattcaactcatagcaggatgaacatggcctttcatagagcaggtttgaaacactctttttgtagtttgtggaagtggacatttcgatcgccttgacgcctacgctgaaaaaggaaatatcttcccataaaaaatagacagagcattctcagaaacttgttggtgatatgtgtcctcaactaacagagttgaactttgccattgatagagagcagttttgaaacactctttttgtggaatctgcaagtggatatttggatagcttggaggatttcgttggaagcgggaattcaaataaaaggtagacagcagcattctcagaaatttctttctgatgtctgcattcaactcatagagttgaagattccctttcatagagcatgtttgaaacactctttctggagtatctggatgtggacatttggagcgctttgatgcctacggtgaaaaagtaaatatcttcccataaaaacgagacagaaggattctgagaaacaagtttgtgatgtgtgtactcagctaacagagtggaacctctcttttgatgcagcagtttggaaacactctttttgtagaaactgtaagtggatatttggatagctctaatgatttcgttggaaacgggaatatcatcatctaaaatctagacagaagccctctcagaaactgctttgtgatatctgcattcaagtcacagagttgaacattcgctttcttagagcacgtttgaaacactctttttgtagtgtctggaagtggacatttggagcgctttgatgcctttggtgaaaaggggaatgtcttcccataaaaactagacagaagcattctcagaaacttgtttgtgatgtgtgtacccagccaaaggagttgaacatttctattgatagagcagttttgaaacgctctttttgtggaaaatgcaggaggatatttggatagcttggaggatttcgttggaagcgggaattcaaataaaatttagacagcagcattctcagaaatttctttctgatgtctgcattcaactcatagagttgaagattccctttcatagagcaggtttgaaacactctttgtggagtatctggatgtggacatttggagcgctttgatgcctacggtgaaaaagtaaatatcttcccataaaaacgagacagaaggattctgagaaacaagtttgtgatgtgtgtactcagctaacagagtggaacctttctttttacagagcagctttgaaactctatttttgtggattctgcaaatggatatttagattgctttaacgatatcgttggaaaagggaatatcgtcatacaaaatctagacagaagcattctcacaaacttctttctgatgtgtgtcctcaaccaacagagttgaacctttcttttgatgcagcagtttggaaacactctttttgtagaaactgtaagtggatatttggatagctctaacgatttcgttggaaacgggaatatcatcatctaaaatctagacagaagcactattagaaactacttggtgatatctgcattcaagtcacagagttgaacattcccttactttgagcacgtttgaaacactcttttggaagaatctggaagtggacatttggagcgctttgatgcctttggtgaaaaggaaacgtcttccaataaaagccagacagaagcattctcagaaacttgttcgtgatgtgtgtactcaactaaaagagttgaacctttctattgatagagcagttttgaaacactctttttgtggattctgcaagtggatatttggattgctttgaggatttcgttggaagcgtgaattcgtataaacactagacagcagcattcccagaaatttctttcggatatttccattcaactcatagagatgaacatggcctttcatagagcaggtttgaaacactctttttgtagtttgtggaagtggacatttcgatcgcgttgacgcctacggtgaaaaaggaaatatcttcccataaacaatagacagaagcattctcagaaacttgttggtgatatgtgtcctcaactaacagagttgaactttgccattgatagagagcagttttgaaacactctttttgtggaatctgcaagtggatatttggatagcttggaggatttcgttggaagcgggaattcaaataaaaggtagacagcagcattctcagaaatttctttctgatgtctgcattcaactcatagagttgaagattccctttcatagagcaggtttgaaacactctttctggagtatccggatgtggacatttggagcgctttgatgcctacggtgaaaaagtaaatatcttcccataaaaacgagacagaaggattctgagaaacaagtttgtgatgtctgtactcggctaacagagtggaacctctcttttgatgcagcagtttggaaacactctttttgtagaaactgtaagtggatatttggatagctctaatgatttcgttggaaacgggaatatcatcatctaaaatctagacagaagcactctcagaaaccactttgtgatatctgcattcaagtcacagagttgaacattcgctttcttagagcacgtttgaaacactctttttgtagtgtctggaagtggacatttggagcgctttgatggctttggtgaaaaagggaacgtcttcccataaaaactagacagaagcattctcagaaacttgtttgtgatgtgtgtacccagccaaaggagttgaacgtttctattgatagagcagttttgaaacactcttgttgtggaaaatgcaagtggatatttggatagcttggaggatttcgttggaagcgggaattcaaataaaaggtagacagcagcattctcagaaatttctttctgatgtctgcattcaactcatagagttgaagattccctttcatagagcaggtttgaaacactctttctggagtatctggatgtggacatttggagcgctttgatgcctacggtgaaaaagtaaatatcttcccataaaaacgagacagaaggattctcagaaacaagtttgtgatgtgtgtactcagctaaaagagtggaacctttctttttacagagcagctttgaaactctatttttgtggattctgcaaattgatatttagattgctttaacgatatcgttggaaaagggaatatcgtcatacaaattctagacagaagcattctcacaaacttctttgtgatgtgtgtcctcaactaacagagttgaacctttcttttgatgcagcagtttggaaacactctttttgtagaaactgtaagtggatatttggatagctctaacgatttcgctggaaacgggaatatcgtcatctaaaatctagacagaagcactattagaaactacttggtgatatctgcattcaagtcacagagttgaacattcccttactttgagcacgtttcaaacactcttttggaagaatctggaagtggacatttggagcgctttgatgcctttggtgaaaaggaaacgtcttccaataaaagccagacagaagcattctcagaaacttgttggtgatgtgtgtactcaactaaaagagttgaacctttctattgatagagcagttttgaaacactctttttgtggattctgcaagtggatatttggattgctttgaggatttcgttggaagcgggaattcatataaaaactagacagcagcattcccagaaatttctttcggatatttccattcaactcatagagatgaacatcgcctttcatagagcaggtttgaaacactctttttgtagtttgtggaagtggacatttcgatcgccttgacgcctacggtgaaaaaggaaatatcttcccataagaaaatagacagaagcattctcagaaacttgttggtgatatgtgtcctcaactaacagagttgaactttgccattgatagagagcagttttgaaacactctttctgtggaatctgcaagtggatatttggatagcttggaggatttcgttggaagtgggaattcaaataaaaggtagacagcagcattctcagaaatttctttctgatgtctgcattcaactcatagagttgaagattccctttcatagagcaggtttgaaacactctttctcgagtatctggatgtggacatttggagcgctttggtaccttcggtgagaaagtaaatatcttcccataaaaccgagacagaaggattctgagaaacaagtttgtgatgtgtgtactcagctaacagagtggaacctctcttttgatgcagcagtttggaaacactctttttgtagaaactgtaagtggatatttggatagctctaatgatttcgttggaaacgggaatatcatcatctaaaatctagacagaagccctttcagaaactactttgtgatatctgcattcaagtcacagagttgaacattcggtttcttagagcacgtttgaaacactctttttgtagtgtctggaagtggacatttggagcgctttgatgcctttggtgaaaaagggaatgtcttcccataaaaactagacagaagcattctcagaaacttctttgtgatgtgtgtacccagccaaaggagttgaacatttctattgatagagcagttttgaaacactcttgttgtggaaaatgcaggtggatatttggatagcttggaggatttcgttggaagcgggaattcaaataaaaggtagacagcagcattctcagaaatttctttctgatgtctgcattcaactcatagagttgaagattccctttcatagagcaggtttgaaacactcgttctggagtatctggatgtggacatttggagcgctttgatgcctacggtggaaaagtaaatatcttcccataaaaacgagacagaaggattctgagaaacaagtttgtgatgtgtgtactcagctaacagagtggaacctttctttttacagagcagctttgaaactctatttttgtggattctgcaaatggatatttagattgctttaacgatatcgttggaaaagggaatatcgtcatacaaaatctggacagaagcattctcacaaacttctttgtgatgtgtgtcctcaactaacagagttgaacctttcttttgatgcagcaatttggaaacacccttttggtagaaactgtaactggatatttggatagctctaacgatttcgttggaaacgggaatatcatcatctaaaatctagacagaagcactattagaaactacttggtgatatctgcattcaagtcacagagtagaacattcccttacttcgaccacgtttgaaacactcttttagaagaatctggaagtggacatttggagcgctttgatgcctttggtgaaaaggaaacgtcttccaataaaagccagacagaagcattctcagaaacttgtttctgatgtgtgtactcaactaaaagagttgaacctttctattgatagagcagttttgaaacactctttttgtggattctgcaagtggatatttggattgctttgaggatttcgttggaagcgggaattcgtataaaaactagacagcagcattcccagaaatttctttcggatatttccattcaactcatagagatgaacatggcctttcatagagcaggtttgaaacactctttttgtagtttgtggaagtggacatttcgatcgccttgacgcctacggtgaaaaaggaaatatcttcccataaaaaatagacagaagcattctcagaaacttgtttgtgatatgtgtcctcaactaacagagttgaactttgccattgatagagagcagttttgaaacactctttttgtggaatctgcaagtggatatttggatagcttggaggatttcgttggaagcgggaattcaaataaaaggtagacagcagcattctcagaaatttctttctgatgtctgcattcaactcatagagttgaagattccctttcatagagcaggtttgaaacactctttctggagtatctggatgtggacatttggagcgctttgaggcctacggtgagaaagtaaatatcttccaataaaaacgagagagaaggattctgagaaacaagtttgtgatgtgtgtactcagctaacagagtggaacctctcttttgatgcagcagtttggaaacactctttttgtagaaactgtaagtggatatttggatagctctaatgatttcgttggaaacgggaatatcatcatctaaaatctagacagaagccctctcagaaactactttgtgatatctgcattcaagtcacagagttgaacattcgctttcttagagcacgtttgaaacactctttttgtagtgtctggaagtggacatttggagcgctttgatgtctttggtgaaaaagggaatgtctacccataaaaactagacagaagcattctcagaaacttgtttgtgatgtgtgtacccagccaaaggagttgaacatttctattgatagagcagttttgaaacactcttgttgtggaaaatgcaggtggatatttggatagcttggaggatttcgttggaagcgggaattcaaataaaaggtagacagcagcattctcagaaatttctttctgatgtctgcattcaactcatagagttgaagattccctttcatagagcaggtttgaaacactcgttctggagtatctcgatgtggacatttggagcgctttgatgcctacggtggaaaagtaaatatcttcccataaaaacgagacagaaaggattctcagaaacaagtttgtaatgtgtgtactcagctaacagagtggaacctttctttttacagagcagctttgaaactctattgttgtggattctgcaaattgatatttagattgctttaacgatatcgttggaaaagggaataccgtcatacaaaatctagacagaagcattctcacaaacagctttgagatgtgtgtcctcaactaacagagttgaacttttcttttgatgcagcagtttcgaaacacccttttggtagaaactgtaagtggatatttggatagctctaacgatttcgttggaaacgggaatatcatcatctaaaatctagacagaagcactattagaaactacttggtgatatctgcattcaagtcacagagttgaacattcccttactttgagcacgtttgaaacactcttttggaagaatctggaagtggacatttggagcgctttgatgcctttggtgaaaaggaaacgtcttccaataaaagccagacagaagcattctcagaaacttgttcgtgatgtgtgtactcaactaaaagagttgaacctttctattgatagagcagttttgaaacactctttttgtggattctgcaagtggatatttggattgctttgaggatttcgttggaatcgggaattcgtataaaaactagacagcagcattgccagaaatttctttcggatatttccattcaactcatagagatgaacatggcctttcatagagcaggtttgaaacactctttttgtagtttgtggaagtggacatttcgatcgccttgacgcctacggtgaaaaaggaaatatcttcccataaaaaatagacagaagcattctcagaaacttgttggtgatatgtgtcctcaactaacagagttgaactttgccattgatagagagcagttttgaaacactctttttgtggaatctgcaagtggatatttggatagcttggaggatttcgttggaagcgggaattcaaataaaaggtagacagcagcattctcagaaatttctttgtgatgtttgcattcaactcatagagttgaacattccctgtcatagagcaggtttgaaacactctttctgtactatctggatgtggacatttggaacgctttgatgcctacggtgaaaaagtaaatatcttcccataaaagctagacagaaggattctgagaaacaagtttgtgatgtgtgtactcagctaacagagtggaacctctcttttgatgcagcagtttggaaacactctttttgtagaaactgtaagtggatatttggatagctctaatgatttcgttggaaaccggaatatcatcatctaaaatctagacagaagccctctcagaaactactttgtgatatctgcattcaagtcacagagttgaacattcgctttcttagagcacgttggaaacactctttttgtagtgtctggaagtggacatttggagcgctttgatgcctttggtgagaaagggaacgtcttcccataaaaactagacagaagcattctcagaaacttgtttgtgatgtgtgtacccagccaaaggagttgaacatttctattgatagagcaggtttgaaacactctttttgtggaaaatgcaagtggatatttggatagcttggaggatttcgttggaagcgggaattcaaataaaaggtagacagcagcattctcagaaatttctttctgatgtctgcattcaactcatagagttgaagattccctttcatagagcaggtttgaaacactcgttctggagtatctggatgtggacatttggagcgctttgatgcctacggtggaaaagtaaatatcttcccataaaaacgagacagaaggattctcagaaacaagtttgtgatgtgtgtactcagctaacagagtggaacctttatttttacagagcagctttgaaactctattttcgtggattctgcaaattgatatttagattgctttaacgatatcgttggaaaagggaatatcgtcatacaaaatctagacagaagcattctcacaaacttctttgtgatgtgtgtcctcaactaacagagttgaacctttcttttgatgcagcaatttggaaacacccttttggtagaaactgtaactggatatttgcttagctctaacgatttcgttggaaacgggaatatcatcatctgaaatctagacagaagcactattagaaactacttggtgatatctgcattcaagtcacggagttgaacattcccttactttgagcacgtttcaaacactcttttggaagaatctggaagtggacatttggagcgctttgatgcctttggtgaaaaggaaacatcttccaataaaagccagacagaagcattctcagaaacttgtttgtgatgtgtgtactcaactaaaagagttgaacctttctattgatagagcagttttgaaacactctttttgtggattctgcaagtggatatttggattgctttgaggatttcgttggaagcgggaattcgtataaaaactagacagcagcattcccagaaatttctttcggatatttccattcgactcatagagatgaacatggcctttcatagagcaggtttgaaacactctttttgtagtttgtggaagtggacatttcgatcgccttgacgcctacggtgaaaaaggaaatatccttcccataaaaaatagacagaagcattctcagaaacttgttagtgatatgtgtcctcaactaacagagttgaactttgccattgatagagagcagttttgaaacactctttttgtggaatctgcaagtggatatttggatagcttggaggatttcgttggaagcgggaattcaaataaaaggtagacagcagcattctcagaaatttctttctgatgtctgtattcaactcatagagttgaacattccctttcatagggcaggtttgaaatactctttctgtagtatctggatgtggacatttggagcgctttgaggcctacgatgaaaaagtaaatatcttcccataaaaacgagacagaaaggattctgagaaacaagtttgtgatgtgtgtactcagctaacagagtggaacctctcttttgatgcagcagtttggaaacactctttttgtagaaactgtaagtggatatttggatagctctaatgatttcgttggaaacgggaatatcatcatctaaaatctagacagagccctctcagaaactactttgtgatatctgcattcaagtcacagagttgaacattcgctttcttagagcacgtttgaaacactctttttatagtgtctggaagtggacatttggagcgctttgatgcctttggtgaaaaagggaatgtcttcccataaaaaatagacagaagcattctcagaaacttgtttgtgatgtgtgtacccagctaaaggagttgaacatttctattgatagagcagttttgaaacactctttttgtggaaaatgcaagttgatatttggatagcttggaggatttcgttggaagcgggaattcaaataaaaggtagacagcagcattctcagaaatttctttctgatgtctgcattcaactcatagagttgaagattccctttcatagagcaggtttgaaacactcgttctggagtatctggatgtggacatttggagcgctttgatgcctacggtggaaaagtaagtatcttcccataaaaacgagacagaaggattctgagaaacaagtttgtgatgtgtgtactcagctaacagagtggaacctttctttttacagagcagctttgaaactctatttttgtggattctgcaaatggatatttagattgctttaacgatatcgctggaaaagggaatatggtcatacaaaatctagacagaagcattctcacaaacttctttgtgatgtgtgtcctcaactaacagagttgaacctttcttttgatgcagcagtttggaaacactgtttttgtagaaactgtaagtggatatttggatagctctaacgatttcgttggaaacgggaatatcatcatctaaaatctagacagaagcactattagaaactacttggtgatatctgcattcaagtcacagagttgaagattcccttactttgagcacgtttgaaacactcttttggaagaatctggaagtggacatttggagcgctttgatgcctttggtgaaaaggaaacgtcttccaataaaagccagacagaagcattctcagaaagttgtttgtgatgtgtgtactcaactaaaagagttgaacctttctattgatagagctgttttgaaacactctttttgtggaatctgcaagtggatatttggattgctttgagcatttcgttggaagcgggatttcatataaaaactagacagcagcattcccagaaatttctttcggatatttccattcaactcatagagatgaacatggcctttcatagagcaggtttgaaacactctttttgtagtttgtggaagtggacatttcgatcgccttgactcctacgctgaaaaaggaaatatcttcccataaaaaatagacagaagcattctcagaaactcgttggtgatatgtgtcctcaactaacagagttgaactttgccattgatagagagcagttttgaaacactctttttgtggaatctgcaagtggatatttggatagcttggaggatttcgttggaagcgggaattcaaataaaaggtagacagcagcattctcagaaatttctttctgatgtctgcattcaactcatagagttgaacattccctttcatagagcaggtttgaaatactctttctgtggtatctggatgtggacatttggagcgctttgaggcctacggtgaaaaagtaaatatcttcccataaaaacgagacagaaggattctgagaaacaagtttgtgatgtgtgtactcagctaacagagtggaacctctcttttgatgcagcagtttggaaacactctttttgtagaaactgtaagtggatatttggatagctctaatgatttcgttggaaacgggaatatcatcatctaaaatctagacagaagccgtctcagaaactactttgtgatatctgcattcaagtcacagagttgaacattcggtttcttagagcacgtttgaaacactctttttgtagtgtctggaagaggacatttggagcgctttgatgcctttggtgaaaaagggaatgtcttcccataaaaactagacagaagcattctcagaaacttgtttgtgatgtgtgtacccagccaaaggagttgaacatttctattgatagagcagttttgaaacactctttttgtggaaaatgcaggtggatatttggatagcttggaggatttcgttggaagcgggaattcaaataaaaggtagacagcagcattctcagaaatttctttctgatgtctgcattcaactcatagagttgaagattccctttcatagagcaggtttgaaacactcgttctggagtatctggatgtggacatttggagcactttgatgcctacggtggaaaagtaaatatcttcccataaaaacgagacagaaggattctcagaaacaagtttgtgatgtgtgtactcagctaacagagtggaacctttctttttacagagcagctttgaaactctatttttgtggattctgcaaattgatatttagattgctttaacgatatcgttggaaaagggaatatcgtcatacaaaatctagacagaagcattctcacaaacttctttgtgatgtgtgtcctcaactaacagagttgaacctttcttttgatgcagcaatttggaaacacccttttggtagaaactgtaactggatatttggatagctctaacgatttcgttggaaacgggaatatcatcatctaaaatgtagagagaagcactattagaaactacttggtgatatctgcattcaagtcacagagttgaacattcccttactttgaggacgtttgaaacactcttttggaagaatctggaagtggacatttggagcgctttgatgcctttggtgaaaaggaaacgtcttccaataaaagccagacagaagcattctcagaaacttgttcgtgatgtgtgtactcaactaaaagagttgaacctttctattgatagagtagttttgaaacactctttttgtggattctgcaagtggatatttggattgctttgaggatttcgttggaagcgggaattcgtataaacactagacagcagcattcccagaaatttctttcggatatttccattcaactcatagagatgaacatggcctttcatagagcaggtttgaaacactctttttgtagtttgtggaagtggacatttcgatcgccttgacgcctacggtgaaaaaggaaatatcttcccataaaaaatagacagaagcattctcagaaacttgttggtgatatgtgtcctcaactaacagagttgaactttgccattggtagagagcagttttgaaacactctttttgtggaatctgcaagtggatatttggatagcttggaggatttcgttggaagcgggaattcaaataaaaggtagacagcagcattctcagaaatttctttctgatgtctgcattcaactcatagagttgaacattccctttcatagagcaggtttgaaacactctttctggagtatctggatgtggacatttggagcgctttgatgcctacggtgaaaaagtaaatatcttcccataaaaacgagacagaaggattctgagaaacaagtttgtgatgtgtgtactcagctaacagagtggaacctctcttttgatgcagcagtttggaaacactctttttgtagaaactgtaagtggatatttggatagctctaacgatttcgttggaaacgggaatatcatcatctaaaatctagacagaagcactattagaaactacttggtgttatctgcattcatgtcacagagtagaacattcccttacttcgagcacgtttgaaacactcttttggaagaatctggaagtggacatttggagcgctttgatgcctttggtgaaaaggaaacgtcttccaataaaagccagacagaagcattctcagaaacttgtttgtgatgtgtgtacccagcaaaaggagttgaacatttctattgatagagcagttttgaaacactctttttgtggaaaatgcaggtggatatttggatagcttggaggatttcgttggaagcgggaattcaaataaaaggtagacagcagcattctcagaaatttctttctgatgtctgcattcaactcatagagttgaagattccctttcatagagcaggtttgaaacactcgttctggagtatctggatgtggacatttggagcgctttgatgcctacggtggaaaagtaaatatcttcccataaaaacgagacagaaggattctcagaaacaagtttgtgatgtgtgtactcagctaacagagtggaacctttcttttaacagagcagctttgaaactctagttttgtggattctgcaaattgatatttagattgctttaacgatatcgttggaaaagggaatatcgtcatacaaaatctagacagaagcattctcacaaacttctttgtgatgtgtgtcctcaactaacagagttgaacctttcttttgatgcagcaatttggaaacacccttttggtagaaactgtaactggatatttggatagctctaacgatttcgttggaaacgggaatatcatcatctaaaatctagacagaagcactattagaaactacttggtgatatctgcattcaagtcacagagttgaacattcccttactttgagcacgtttcaaacactcttttggaagaatctggaagtggacatttggagctgctttgatgcctttggtgaaaaggaaacgtcttccaataaaagccagacagaagcattctcagaaacttgtttgtgatgtgtgtactcaactaaaagagttgaacctttctattgatagagcagttttgaaacactctttttgtggattctgcaagtggatatttggattgctttgaggatttcgttggaagcgggaattcgtataaaaactagacagcagcattcccaggaatttctttcggatatttccattcaactcatagagatgaacatggcctttcatagagcaggtttgaaacacactttttgtagtttgtggaagtggacatttcaatcgccttgatgcctacggtgaaaaaggaaatatcttcccataaaaaatagagagaagcattctcagaaacttgttggtgatatgtgtcctcaactaacagagttgaacttcgccattgatagagagcagttttgagacactctttttgtggaatctgcaagtggatatttggatagcttggaggatttcgttggaagcaggaattcaaataaaaggtagacagccagcattctcagaaatttctttctgatgtctgcattcaactcatagagttgaacattctctttcatagagcaggtttgaaacactctttctggagtatctggatgtggacatttggagcgctttgatgcctacggtgaaaaagtaaatatcttcccataaaaacgagacagtaaggattctcagaatcaagtttgtgatgtgtgtactcagctaacagagtggaacctctcttttgatgcagcagtttggaaacactctttttgtagaaactgtaagtggatatttagatagctctaatgatttcgttggaaacgggaatatcatcatctaaaatctagacagaagcactattagaaactactttgtgatatctgcattcaagtcacagagttgaacattcgctttcttagagcacgttggaaacactcattttgtagtgtctggaagtggacatttggagcgctttgatgcctttggtgaaaaaggaaacgtcttccaataaaagccagacagaagcattctcagaaacttgtttgtgatgtgtgtacccagccaaaggagttgaacatttctattgatagagcagttttgaaacgctctttttgtggaaaatgcaggtggatatttggatagcttggaggatttcgttggaagcgggaattcaaataaaaggtagacagcagcattctcagaaatttctttctcatgtctgcattcaactcatagagttgaagattccctttcatagagcaggtttgaaacactctttctggagtatctggatgtggacatttggagcgctttgatgcctacggtgaaaaagtaaatatcttcccataaaaacgagacagaaggattctgagagacaagtttgtgatgtgtgtactcagctaacagagtggaacctttctttttacagagcagctttgaaactctatttttgtggattctgcaaatggatatttagattgctttaatgatatcgttggaaaagggaatatcgtcatacaaaatctggacagaagcattctcacaaacttctttgtgatgtgtgtcctcaactaacagagttgaaactttcttttgatgcagcagtttggaaacactctttttgtagaaactgtaagtggatatttggatagctctaacgatttcgttggaaacgggaatatcatcatctaaaatctagacagaagcactattagaaactacttggtgatatctgcattcaagtcacagagttgaacattcccttactttgagcacgtttgaaacactcttttggaagaatctggaagtggacatttggagcgctttgatgcctttggtgaaaaggaaacgtcttccaataaaagccagacagaagcattctcagaaacttgttcgtggtgtgtgtactcaactaaaagagttgaacctttctattgatagagcagttttgaaacactctttttgtggattctgcaagtggatatttggattgctttgaggatttcgttggaagcgggaattcgtataaacactagacagcagcattcccagaattttctttcggatatttccattcaactcatagagatgaacatggcctttcatattgaaacactctttttgtagtttgtggaagtggacagttcgatcgccttgacgcctacggtgaaaaaggaaatatcttcccataaaaaatagacagaagcattctcagaaacttgttggtgatatgtgtcctcaactaacagagttgaactttgccattgatagagagcagttttgaaacactctttttgtggaatctgcaagtggatatttggatagcttggaggatttcgttggaagcgggaattcaaataaaaggtagacagcaggattctgagaaacaagtttgtgatgtgtgtactcagctaacagagtggaacctctcttttgatgcagcagtttggaaacactctttttgtagaaactgtaagtggatatttggatagctctaattatttcgttggaaacgggaatatcatcatctaaaatctagacagaaagcactctcaggaaactactttgtgatatctgcattcaagtcacagagttgaacattcgctttcttagagcacgtttgaaacactctttttgtagtgtctggaagtggacatttggagcgctttgatggctttggtgaaaaagggaacgtcttcccataaaaactagacagaagcattctcagaaacttgtttgtgatgtgtgtacccagccaaaggagttgaacgtttctattgatagagcagttttgaaacactcttgttgtggaaaatgcaagtggatatttggatagcttggaggatttcgttggaagcgggaattcaaataaaaggtagacagcagcattctcagaaatttctttctgatgtctgcattcaactcatagagttgaagattccctttcatagagcaggtttgaaacactcgttctggagtatctggatgtggacatttggagcgctttcgatgcctacggtggaaaagtaaatatcttcccataaaaacgagacagaaggattctcagaaacaagtttgtgatgtgtgtactcagctaacagagtggaacctttctttttacagagcagctttgaaactctatttttgtggattctgcaaattgatatttagattgctttaacgatatcgttggaaaagggaatatggtcatacaaaatctagacagaagcattctcacaaacttctttgtgatgtgtgtcctcaactaacagagttgaacctttcttttgatgcagcaatttggaaacacccttttggtagaaactgtaagtggatatttggatagctctaacgatttcgttggaaacgggaatatcatcatctaaaatctagacagaagcactattagaaactacttggtgatatctgcattcaagtctcagagttgaacattcccttacttcgaacacgtttgaaacactcttttggaagaatctggaagtggacatttggagcgctttgatgcctttggtgaaaaggaaacgtcttccaataaaagccagacagaagcattctcagaaacttgtttgtgatgtgtgtactcaactaaaagagttgaacctttctattgatagagcagttttgaaacactctttttgtggattctgcaagtggatatttggattgctttgaggatttcgttggaagcgggaattcgtataaaaactagacagcagcattcccagaaatttctttcggatatttccattcgactcatagagatgaacatggcctttcatagagcaggtttgaaacactctttttgtagtttgtggaagtggacatttcgatcgccttgacgcctacggtgaagaaggaaatatcttcccataaaaaatagacagaagcattctcagaaacttgttggtgatatgtgtcctcaactaacagagttgaactttgccattgatagagagcagttttgaaacactctttttgtggaatctgcaagtggatatttggatagcttggaggatttcgttggaagcgggaattcaaataaaaggtagacagcagcattctcagaaatttctttctgatgtctgcattcaactcatagagttgaagattccctttcatagagcaggtttgaaacactctttctggagtatctggatgtggacatttggagcgctttgatgcctacggtgaaaaagtaaatatcttccaataaaaacgagacagaaggattctgagaaacaagtttgtgatgtgtgtactcagctaacagagtggaacctctcttttgatgcagcagtttggaaacactctttttgtagaaactgtaagtggatatttggatagctctaatgatttcgttggaaacgggaatatcatcatctaaaatctagacagaggcactctcagaaactactgtgtgatatctgcattcaagtcacagagttgaacattcgctttcttagagcacgtttgaaacactctttttgtagtgtctggaagtggacatttggagcgctttgattcctttggtgaaaaagggaatgtctacccataaaaactagacagaagcattctcagaaacttgtttgtgatgtgtgtacccagccaaaggagttgaacatttctattgatagagcagttttgaaacactcttgttgtggaaaatgcaggtggatatttggatagcttggaggatttcgttggaagcgggaattcaaataaaaggtagacagcagcattatcagaaatttctttctgatgtctgcattcaactcatagagttgaagattccctttcatagagcaggtttgaaacactcgttctggagtatctggatgtggacatttggagcgctttgatgcctacggtggaaaagtaaatatcttcccataaaaacgagacagaaggattctgagagacaagtttgtgatgtgtgtactcagctaacagagtggaacctttctttttacagagcagctttgaaactctatttttgtggattctgcaaatggatatttagattgctttaacgatatcgttggaaaagggaatatcgtcatacaaaatctggacagaagcattctcacaaacttctttgtgatgtgtgtcctcaactaacagagttgaacctttcttttgatgcagcagtttggaatcacccttttggtagaaactgtaacttgatatttggatagctctaacgatttcgttggaaacgggaatatcatcatctaaaatctagacagaagcactattagaaactacttggtgatatctgcattcaagtcacagagttgaacattcccttactttgagcacgtttcaaacactcttttggaagaatctggaagtggacatttggagcgctttgatgcctttggtgaaaaggaaacgtcttccaataaaagccagacagaagcattctcaggaaacttgtttgtgatgtgtgtactcaactaaaagagttgaacctttctattgatagagcagttttgaaacactctttttgtggattctgcaagtggatatttggattgctttgaggatttcgttggaagcgggaattcgtataacaactagacagcagcattcccagaaatttctttcggatatttccattcaactcatagagatgaacatggcctttcatagagcaggtttgaaacactctttttgtagtttgtggaagtggacatttcgatcgccttgacgcctacggtgaaaaaggaaatatcttcccataaaaaatagacagaagcattctcagaaacttgttggtgatatgtgtcctcaactaacagagttgaactttgccattgatagagagcagtttagaaacactctttttgtggaatctgcaagtggatatttggatagcttggaggatttcgttggaagcgggaattcaaataaaaggtagacagcagcattctcagaaatttctttctgatgtctgcattcaactcatagagttgaagattccctttcatagagcaggtttgaaacactctggagtatctggatgtggacatttggagcgctttgatgcctacggtgaaaaagtaaatatcttcccataaaaacgacacagaaggattctcagaaacaagtttgtgatgtgtgtactcagctaacagagtggaacctctcttttgatgcagcagtttggaaacactctttttgtagaaactgtaagtggatatttggatagctctaatgatttcgttggaaacgggaatatcatcatctaaaatctagacagaagcactctcagaaactactttgtgatatctgcattcaagtcacagagttgaacgttcgctttcttagagcacgtttgaaacactctttttgtagtgtctggaagtggacatttggagtgctttgattcctttggtgaaaaagggaatgtctacccataaaaactagacagaagcattctcagaaacttgtttgtgatgtgtgtacccagccaaaggagttgaacatttctattgatagagcagttttgaaacactcttgttgtggaaaatgcaggtggatatttggatagcttggaggatttcgttggaagcgcgaattcaaataaaaggtagacagcagcattctcagaaatttctttctgatgtctgcattcaactcatagagttgaagattccctttcatagagcaggtttgaaacactcgttctggagtatctggatgtggacatttggagcgtttgatgcctacggtggaaaagtaaatatcttcccataaaaacgagacagaaggattctgagaaacaagtttgtgatgtgtgtactcagctaacagagtggaacctttctttttacagagcagctttgaaactctatttttgtggattctgcaaatggatatttagattgctttaacgatatcgttggaaaagggaatatcgtcatacaaaatctagacagaagcattctcacaaacttctttgtgatgtgtgtcctcaactaacagagttgaacctttcttttgatgcagcagtttggaaacactctttttgtagaaactgtaagtggatatttggatagctctaacgatttcgttggaaacgggaatatcatcatctaaaatctagacagaagcactattagaaactacttggtgatatctgcattcaagtcacagagttgaacattcccttactttgagcacgattgaaacactcttttggaagaatctggaagtggacatttggagcgctttgatgcctttggtgaaaaggaaacgtcttccaataaaagccagacagaagcattctcagaaacttgatcgtgatgtgtgtactcaactaaaagagttgaacctttctattgatagagcagttttgaaacactctttttgtggattctgcaagtggatatttggattgctttgaggattttgttggaagcgggaattcgtataaacactagacagcagcattcccagaaatttcttttggatatttccattcaactcatagagatgaacatggcctttcatattgaaacactctttttgtagtttgtggaagtggacatttcgatcgccttgacgcctacggtgaaaaaggaaatatcttcccataaaaaatagacagaagcattctcagaaacttgttggtgatatgtgtcctcaactaacagagttgaactttgccattgatagagagcagttttgaaacactctttttgtggaaaatgcaggtggatatttggatagcttggaggatttcgttggaagcgggaattcaaataaaaggtagacagcagcattctcagaaatttctttctgatgtctgcattcaacacatagagttgaagattccctttcatagagcaggtttgaaacactctttctggagtatctggatgtggacatttggagcgctttgatgcctacggtgaaaaagtaaatatcttcccataaaaacgagacagaaggattctgagaaacaagtttgtgatgtgtgtactcagctaacagagtggaacctctcttttgatgcagcagtttggaaacactctttttgtagaaactgtaagtggatatttggatagctctaatgatttcgttggaaacgggaatatcatcatctaaaatctagacagaagccctctcaggaaactactttgtgatatctgcattcaagtcacagagttgaacattcactttcttagagcacgtttgaaacactctttttgtagtgtctggaattggacatttggagcgctttgatgcctttggtgaaaaagggaacgtcttcccataaaaactagacagaagcattctcagaaacttgtttgtgatgtgtgtacccagccaaaggagttgaacatttctattgatagagcagttttgaaacactctttttgtggaaaatgcaggtggatatttggatagcttggaggatttcgttggaagcgggaattcaaacaaaaggtagacagcagcattctcagaaatttctttctgatgtctgcattcaactcatagagttgaagattccctttcatagagcaggtttgaaacactctttctggagtatctggatgtggacatttggagcgctttgatgcctacggtgaaaaagtaaatatcttcccataaaaacgagacagaaggattctgagagacaagtttgtgatgtgtgtactcagctaacagagtggaacctttctttttacagagcagctttgaaactctatttttgtggattctgcaaatggatatttagattgctttaacgatatcgttggaaaagggaatatcgtcatacaaaatgctggacagaagcattctcacaaacttctttgtgacgtgtgtcctcaactaacagagttgaacctttcttttgatgcagcagtttggaaacactgtttttgtagcaactgtaagtggatatttggatagctctaacgatttcgttggaaacgggaatatcatcatctaaaatctagacagaagcactattagaaactacttggtgatatctgcattcaagtcacagagtagaacattcccttacttcgagcacgtttgaaacactcttttggaagaatctggaagtggacatttggagcgctttgatgcctttggtgaaaaggaaacgtcttccaataaaagccagacagaagcattctcagaaacttgtttgtgatgtgtgtactcaactaaaagagttgaacctttctattgatagagcagttttgaaacactctttttgtggattctgcaagtggatatttggattgctttgaggatttcgttggaagcgggaattcgtataaacactagacagcagcattcccagaaatttctttcggatatttccattcaactcatagagatgaacatggcctttcatagagcaggtttgaaacactctttttgtagtttgtggaagtggacatttcgatcgccttgacgcctacggtgaaaaaggaaatatcttcccataaaaatagacagaagcattctcagaaacttgttggtgatatgtgtcctcaactaacagagttgaactttgccattgatagagagcagttttgaaacactctttttgtggaatctgcaagtggatatttggatagcttggaggatttcgttggaagcgggaattcaaataaaaggtagacagcagcattctcagaaatttctttgtgatgtctgcattcaactcatagagttgaagattccctttcatagagcaggtttgaaacactcgttctggagtatctggatgtggacatttggagcgctttgatgcctacggtggaaaagtaaatatcttcccataaaaacgagacagaaggattctgagaaacaagtttgtgatgtgtgtactcagctaacagagtggaacctctcttctgatgcagcagtttggaaacactctttttgtagaaactgtaagtggatatttggatagctctaatgatttcgttggaaatgggaatatcatcaactaaaatctagacagaagccctctcagaaactactttgtgatatctgcattcaagtcacagagttgaacattcgctttcttagagcacgttggaaacactctttttatagtgtctggaagtggacatttggagcgctttgatgcctttggtgaaaaagggaatgtcttcccataaaaactagacagaagcattctcagaaacttgtttgtgatgtgtgtacccagccaaaggagttgaacatttctattgatagagcagttttgaaacactctttttgtggaaaatgcaggtggatatttggatagcttggaggatttcgttggaagcgggaattcaaataaaaggtagacagcagcattctcagaaatttctttctgatgtctgcattcaactcatagagttgaagattccctttcatagagcaggtttgaaacactctttctggagtatctggatgtggacatttggagcgctttgatgcctacggtgaaaaagtaaatatcttcccataaaaacgagacagaaggattctcagaaacaagtttgtgatgtgtgtactcagctaacagagtggaacctttctttttacagagcagctttgaaaccctatttttgtggattctgcaaatggatatttagattgctttaatgatatcgctggaaaagggaatatggtcatacaaaatctagacagaagcattctcacaaacttctttgtgatgtgtgtcctcaactaacagagttgaacctttcttttgatgcagcaatttggaaacacccttttggtagaaactgtaactggatatttggatagctctaacgatttcgttggaaacgggaatatcatcatcaaaaggtagacagaagcactattagaaactacttggtgatatctgcattcaagtcacagagttgaacattcccttactttgagcacgtttcaaacactcttttggaagaatctggaagtggacatttggagcgctttgatgcctttggtgaaaaggaaacgtcttccaataaaagccagacagaagcattctcagaaacttgtttgtgatgtgtgtactcaactaaaagagttgaacctttctattgatagagcagttttgtaacactctttttgtggattctgcaagtggatatttggattgctttgaggatttcgttggaagcgggaattcgtataaaaactagacagccagcattcccagaaatttctttcggatatttccattcaactcatagagatgaacatggcctttcatagagcaggtttgaaacactctttttgtagtttgtggaagtggacatttcgatcgccttgacgcctacggtgaaaaaggaaatatcttcccataaaaaatagacagaagcattctcagaaacttgttggtgatatgtgtcctcaactaacagagttgaactttgccattgatagagagcagttttgaaacactctgtttgtggaatctgcaagtggatatttggatagcttggaggatttcgttggaagcgggaattcaaataaaaggtagacagcagcattctcagaaatttccttctgatgtctgcattcaactcatagagttgaagattccctttcatagagcaggtttgaaacactctttctggagtatctggatgtggacatttggagcgctttgatgcctacggtgaaaaagtaaatatcttcccagaaaaacgagacagaaggattctgagaaacaagtttgtgatgtgtgtactcagctaacagagtggaacctctcttttgatgcagcagtttggaaacactctttttgtagaaactgtaagtggatatttggatagctctaatgatttcgttggaaacgggaatatcatcatctaaaatctagacagaagccctctcagaaactactttgtgatatctgcattcaagtcacagagttgaacattcgctttcttagagcacgttggaaacactctttttgtagtgtctggaagtggacatttggagtgctttgatgcctttggtgaaaaagggaatgtcttcccataaaaactagacagaagcattctcagaaacttgtctgcgatgtgtgtacccagctaaaggagttgaacatttctattgatagagcagttttgaaacactctttttgtgaaaaatgcaagtggatatttggatagcttggaggatttcgttggaagcgggaattcaaataaaaggtagacagcagcattctcagaaaatttctttctgatgtctgcattcaactcatagagttgaagattccctttcatagagcaggtttgaaacactctttctggagtatctggatgtggacatttggagcgctttgatgcctacggtgaaaaagtaaatatcttcccataaaaacgagacagaaggattctgagaaacaagtttgtgatgtgtgtactcagctaacagagtggaacctttctttttacagagcagctttgaaactctatttttgtggattctgcaaattgatatttagattgctttaacgatatcgttggaaaagggaatatcgtcatacaaaatctagacagaagcattctcacaaacttctttgtgatgtgtgtcctcaactaacagagttgaacctttcttttgatgcagcagtttggaaacactctttttgtagaaactaagtggatatttggatagctctaacgatttcgttggaaacgggaatatcatcatctaaaatctagacagaagcactattagaaactacttggtgatatctgcattcaagtcacagagttgaacattcccttactttgagcacgtttcaaacactcttttggaagaatctggaagtggacatttggagcgctttgatgcctttggtgaaaaggaaacgtcttccaataaaagccagacagaagcattctcagaaacttgtttgtgatgtgtgtactcaactaaaagagttgaacctttctattgatagagcagttttgaaacactctttttgtggattctgcaagtggatatttggattgctttgaggatttcgttggaagcgggaattcgtataaaaactagacagcaagcattcccagaaatttctttcggatatttccattcaactcatagagatgaacatcgcctttcatagagcaggtttgaaacactctttttgtagtttgtggaagtggacatttcgatcgccttgacgcctatggtgaaaaaggaaatatcttcccataaaaaatagacagaagcattctcagaaacttgttggtgatatgtgttctcaactaacagagttgaactttgccattgatagagagcagttttgaaacactctttttgtggaatctgcaagtggatatttggatagcttggaggatttcgttggaagcgggaattcaaataaaaggtagacagcagcattctcagaaatttctttctgatgtctgcattcaactcatagagttgaagattccctttcatagagcaggtttgaaacactctttctggagtatctggatgtggacatttggagcgctttgatgcctacggtggaaaagtaaatatcttcccataaaaacgagacagaaggattctcagaaacaagtttgtgatgtgtgtactcagctaacagagtggaacctctcttctgatgcagaagtttggaaacactctttttgtagaaactgtaagtggatatttggatagctctaatgatttcgttggaaacgggaatatcatcatctaaaatctagacagaagccctctcagaaactactttgtgatatctgcattcaagtcacagagttgaacattcgctttcttagagcacgtttgaaacactctttttgtagtgtctggaagtggacatttggagcgctttgattccttttgtgaaaaagggaatgtctacccataaaaactagacagaagcattctcagaaacttgtttgtgatgtgtgtacccagccaaaggagttgaacatttctattgatagagcagttttgaaacactcttgttgtggaaaatgcaggtggatatttggatagcttggaggatttcgttggaagcgggaattcaaataaaaggtagacagcagcattctcagaaatttctttctgatgtctgcattcaactcatagagttgaagattccctttcctagagcaggtttgaaacactctttctggagtatctggatgtggacatttggagcgctttgatgcctacggtgaaaaagtaaatatcttcccataaaaacgagacagaaggattctcagaaacaagtttgtgatgtgtatactcagctaacagagtggaacctttctttttacagagcagctttgaaactctatttttgtggattctgcaaattgatatttagattgctttaacgatatcgttggaaaagggaatatcgtcatacaaaatctagacagaagcattctcagaaacttctttgtgatgtgtgtcctcaactaacagagttgaacctttcttttgatgcagcagtttggaaacactctttttgtagaaactgtaagtggatatttggatagctctaacgatttcatttgaaacgggaatatcatcatctaaaatctagacagaagcagtattagcaactacttggtgatatctgcattcaagtcagagagtagaacgttaccatagtttgagcacgtttgaaacactctttttgtagaatctggaattggacatttggagcgctttgatgccattggtgaaaaggaaacgtcttcccataaaagctagacagaagcattctcagaaacttgtttgtgatgtgtgtactcaactaaaagagtggaacctttctattgatagagcagttttgaaacactctttttgtggattctgcaagtggatatttggattgctttgaggatttcgttggaagcgggaattcgtataaaaactagacagcagcattcccagaaatttctttcggatatttccattcaactcatagagatgaacatggcctttcatagagcaggtttgaaacactctttttgtagtttgtggaagtggacatttcgatcgccttgacgcctacggtgaaaaaggaaatatcttcccataaaaaatagacagaagcattctcagaaacttgttggtgatatgtgtcctcaactaacagagttgaactttgccattgatagagagcagttttgaaacactctttttgtggaatctgcaagtggatatttggatagcttggaggatttcgttggaagcgggaattcaaataaaaggtagacagcagcattctcagaaatttctttctgatgtctgcattcaactcatagagttgaagattccctttcatagagcaggtttgaaacactctttctggagtatctggatgtggacatttggagcgctttgatgcctacggtgaaaaagtaaatatcttcccatagaaacgagacagaaggattctgagaaacaagtttgtgatgtgtgtactcagctaacagagtggaacctctcttttgatgcagcagtttggaaacactctttttgtagaaactgtaagtggatatttggatagctctaatgatttcgttggaaacgggaatatcatcatctaaaatctagacagaagtcctctcagaaactactttgtgatatctgcattcaagtcacagagttgaacattcgctttcttagagcacgttggaaacactctttttgtagtgtctggaagtggacatttggagcgctttgatgcctttggtgaaaaagggaatgtcttcccataaaaactagacagaaggattctcagaaacttgtttgtgatgtgtgtacccagctaaaggagttgaacatttctattgatagagcagttttgaaacactctttttgtggaaaatgcaagtggatatttggataggttggaggatttcgttggaagcgggaattcaaataaaaggtagacagcagcattctcagaaatttctttctgatgtctgcattcaactcatagagttgaagattccctttcatagagcaggtttgaaacactctttctggagtatctggatgtggacatttggagcgctttgatgcctacggtgaaaaagtaaatatcttcccataaaaacgagacagaaggattctgagagacaagtttgtgatgtgtgtactcagctaacagagtggaacctttctttttacagagcagctttgaaactctatttttgtggattctgcaaatggatatttagattgctttaatgatatcgctggaaaagggaatatggtcatacaaaatctagacagaagcattctcacaaacttctttgtgatgtgtgtcctcaactaacagagttgaacctttcttttgatgcagcagtttggaaacactctttttgtagaaactgtaagtggatatttggatagctctaacgatttcgttggaaacgggaatatcatcatctaaaatctagacagaagcactattagaaactacttggtgatatctgcattcaagtcacagagttgaacattcccttacgttgagcacgtttgaaacactcttttggaagaatctggaagtggacatttggagcgctttgatgcctttggtgaaaaggaaacgtcttccaataaaagccagacagaagcattctcagaaacttgtttgtgatgtgtgtactcaactaaaagagttgaacctttctattgatagagcagttttgaaacactctttttgtggattctgcaagtggatatttggattgctttgaggatttcgttggaagcgggaattcgtataaaaactagacagcagcattcccagaaatttctttcggatatttccattcgactcatagagatgaacatggcctttcatagcagcaggtttgaaacactctttttgtagtttgtggaagtggacatttcgatcgccttgacgcctacggtgaaaaaggaaatatcttcccataaaaaatagacagaagcattctcagaaacttgtttgtgatgtgtgtacccagccaaaggagttgaacatttctattgatagagcagttttgaaacactcttgttgtggaaaatgcaggtggatatttggatagcttggaggatttcgttgtaagcgggaattcaaataaaaggtagacagcagcattctcagaaatttctttctgatgtctgcattcaactcatagagttgaacattccctttcatagagcaggtttgaaacagtctttctggagtatctggatgtggacatttggagcgctttgatgcctacggtgaaaaagtaaatatcttcccataaaaacgagacagaaggattctgagaaacaagtttgtgatgtgtgtactcagctaacagagtggaacctctcttttgatgcagcagtttggaaacactctttttgtagaaactgtaattggatatttggatagctctaatgatttcgttggaaacgggaatatcatcatctaaaatctagacagaagccctctcagaaactactttgtgatatctgcattcaagtcacagagttgaacattcgctttcttagggcacgttggaaacactctttttgtagtgtctggaagtggacatttggagcgctttgatgcctttggtgaaaaagggaacgtcttcccataaaaactagacagaagcattctcagaaacttgtttgtgatgtgtgtacccagctaaaggagttgaacatttctattgatagagcagttttgaaacactctttttgtggaaaatgcaagtggatatttggatagcttggaggatttcgttggaagcgggaattcaaataaaaggtagacagcaggattctcagaaacaagtttgtgatgtgtgaactcagctaacagagtggaacctttctttttacagagcagctttgaaactctatttttgtggattctgcaaattgatatttagattgctttaacgatatcgttggaaaagggaatatggtcatacaaaatctagacagaagcattctcacaaacttctttgtgatgtgtgtcctcaactaacagagttgaacctttcttttgatgcagcaatttggaaacacccttttggtagaaactgtaactggacatttggatagctctaacgatttcgttggaaacgggaatatcatcatctaaaatctagacagaagcactattagaaactacttggtgatatctgcattcaagtcacagagtagaacattcccttacttcgagcacgtttgaaacactcttttggaagaatctggaagtggacatttggagcgctttgatgcctttggtgaaaaggaaacgtcttccaataaaagccagacagaagcattctcagaaacttgtttgtgatgtgtgtacccagccaaaggagttgaacatttctattgatagagcagttttgaaacactcttgttttggaaaatgcaggtggatatttggatagcttggaggatttcgttggaagcgggaattcaaataaaaggtagacagcagcattcccagaaatttctttcggatatttccattcgactcatagagatgaacatggcctttcatagagcaggtttgaaacactctttttgtagtttgtggaagtggacatttcgatcgccttgacgcctacggtgaaaaaggaaatatcttcccataaaaaatagacagaagcattctcagaaacttgttggtgatatgtgtcctcaactaacagagttgaactttgccattgatagagagcagttttgaaacactctttttgtggaatctgcaagtggatatttggatagcttggaggatttcgttggaagcgggaattcaaataaaaggtagacagcagcattctcagaaatttctttctgatctctgcattcaactcatagagttgaagattccctttcatagagcaggtttgaaacactctttctggagtatctggatgtggacatttggagcgctttgatgcctacggtgaaaaagtaaatatcttcccataaaaacgagacagaaggattctgagaaacaagtttgtgatgtgtgtactcagctaacagagtggaacctctcttttgatgcagcagtttgcaaacactctttttgtagaaactgtaagtggatatttggatagctctaatgatttcgttggaaacgggaatatcatcatctaaaatctagacagaagcactctcagaaactactgtgtgatatctgcattcaagtcacagagttgaacattcgctttcttagagcacgtttgaaacactctttttgtagtgtctggaagtggacatttggagcgctttgatgcctttggtgaaaaagggaatgtctacccataaaaactagacagaagcattctcagaaacttgtttgtgatgtgtgtacccagccaaaggagttgaacatttctattgatagagcagttttgaaacactcttgttgtggaaaatgcaggtggatatttggatagcttggaggatttcgttggaagcgggaattcaaataaaaggttgacagcggcattctcagaaatttctttctgatgtctgcattcaactcatagagttgaagattccctttcatagagcaggtttgaaacactctttctggagtatctggatgtggacatttggagcgctttgatgcctacggtgaaaaagtaaatatcttcccataaaaacgagacagaaggattctgagaaacaagtttgtgatgtgtgtactcagctaacagagtggaacctttctttttacagagcagctttgaaactctatttttgtggattctgcaaatggatatttagattgctttaatgatatcgctggaaaagggaatatggtcatacaaaatctagacagaagcactctcacaaacttctttgtgatgtgtgtcctcaactaacagagttgaacctttcttttgatgcagcaatttggaaacacccttttggtagaaactgtaactggatatttggatagctctaacgatttcgttggaaacgggaatatcatcatctaaaatgtagacagaagcactattagaaactacttggtgatatctgcattcaagtcacagagttgaacattcccttacttcgagcacgtttgaaacactcttttggaagaatctggaagtggacatttggagcgctttgatgcctttggtgaaaaggaaacgtcttccaataaaagccagacagaagcattctcagaaacttgttcgtgatgtgtgtactcaactaaaagagttgaacctttctattgatagagcagttttgaaacactctttttgtggattctgcaagtggatatttggattgctttgaggatttcgttggaagcgggaattcatataaaaactagacagcagcattcccagaaatttctttcggatatttccattcaactcatagagatgaacatggcctttcatagagcaggtttgaaacactctttttgtagtttgtggaagtggacatttcgatcgccttgacggctacggtgaaaaaggaaatatcttcccataaaaaatagacagaagcattctcagaaacttgttggtgatatgtgtcctcaactaacagagttgaactttgccattgatagagagcagttttgaaacactctttttgtggaatctgcaagtggatatttggatagcttggaggatttcgttggaagcgggaattcaaataaaaggtagacagcaggattctgagaaacaagtttgtgatgtgtgtactcagctaacagagtggaacctctcttttgatgcagcagtttggaaacactctttttgtagaaactgtaagtggatatttggatagctctaatgatttcgttggaaacgggaatatcatcatctaaaatctagacagaagccctctcagaaactactttgtgatatctgcattcaagtcacagagttgaacattcgctttcttagagcacgtttgaaacactctttttgtagtgtctggaagtggacatttggagcgctttgatgcctttgtgaaaaagggaacgtcttcccataaaaactagacagaagcattctcagaaacctgtttgtgatgtgtgtacccagccaaaggagttgaacatttctattgatagagcagttttgaaacgctctttttgtggaaaatgcaggtggatatttggatagcttggaggatttcgttggaagcgggaattcaaataaaaggtagacagcagcattctcagaaatttctttctgatgtctgcattcaactcatagagttgaagattccctttcatagagcaggtttgaaacactctttctggagtatctggatgtggacatttggagcgctttgatgcctacggtgaaaaagtaaatatcttcccataaaaacgagacagaaggattctgagagacaagtttgtgatgtgtgtactcagctaacagagtggaacctttctttttacagagcagctttgaaactctatttttgtggattctgcaaatggatatttagattgctttaatgatatcgttggaaaagggaatatggtcatacaaaatctagacaggataagcattctcacaaacttctttgtgatgtgtgtcctcaactaacagagttgaacctttcttttgatgcagcaatttggaaacacccttttggtagaaactgtaactggatatttggatagctctaacgatttcgttggaaacgggaatatcatcatctaaaatctagacagaagcactattagaaactacttggtgatatctgcattcaagtcacagagttgaacattcccttacttcgaccacgtttgaaacactcttttggaagaatctggaagtggacatttggagcgctttgatgcctttggtgaaaaggaaacgtcttccaataaaagccagacagaagcattctcagaaacttgttcgtgatgtgtgtactcaactaaaagagttgaacctttctattgatagagcagttttgaaacactctttttgtggattctgcaagtggatatttggattgctttgaggatttccgttggaagcgggaattcgtataaacactagacagcagcattcccagaaatttctttcggatatttccattcaactcatagagatgaacatggcttttcatagagcaggtttgaaacactctttttgtagtttgtggaagtggacatttcgatcgccttgacgcctacgctgaaaaaggaaatatcttcccataaaaaatagacagaagcattctcagaaacttgttggtgatatgtgtcctcaactaacagagttgaactttgccattgatagagagcagttttgaaacactctttttgtggaatctgcaagtggatatttggatagcttggaggatttcgttggaagcgggaattcaaataaagggtagacagcaggattctgagaaacaagtttgtgatgtgtgtactcagctaacagagtggaacctctcttttgatgcagcagtttggaaacactctttttgtagaaactgtaagtggatatttggatagctctaatgatttcgttggaaacgggaatatcatcatctaaaatctagacagaagccctctcagaaactactttgtgatatctgcattcaagtcacagagttgaacattcgctttcttagagcacgtttgaaacactctttttgtagtgtctggaagtggacatttggagcgctttgatgactttggtgaaaaagggaacgtcttcccataaaaactagacagaagcattctcagaaacttgtttgtgatgtgtgtacccagccaaaggagttgaacatttctattgatagagcagttttcaaacactctttttgtggaaaatgcaggtggatatttggatagcttggaggatttcgttggaagcgggaattcaaataaaaggtagacagcagcattctcagaaatttctttctgatgtctgcattcaactcatagcagttgaagattccctttcatagagcaggtttgaaacactctttctggagtatctggatgtggacatttggagcgctttgatgcctacggtgaaaaagtaaatatcttcccataaaaacgagacagaaggattctcagaaacaagtttgtgatgtgtgtactcagctaaaagagtggaacctttctttttacagagcagctttgaaactctatttttgtggattctgcaaattgatatttagattgctttaacgatatcgttggaaaagggaatatcgtcatacaaaatctagacagaagcattctcacaaacttctttgtgatgtgtgtcctcaactaacagagttgaacctttcttttgatgcagcagtttggaaacactctttttgtagaaactgtaagtggacatttggatagctctaacgatttcgttggaaacgggaatatcatcatctaaaatctagacagaagcattctcagaaacttgttggtgatgtgtgtactcaactaaaagagttgaacctttctattgatagagcagttttgaaacactctttttgtggattctgcaagtggatatttggattgctttgaggatttcgttggaagcgggaattcatataaacactagacagcagcattcccagaaatttctttcggatatttccattcaactcatagagatgaacatcgcctttcatagagcaggtttgaaacactctttttgtagtttgtggaagtggacatttcgatcgccttgacgcctacggtgaaaaaggaaatatcttcccataaaaaatagacagaagcattctcagaaacttgttggtgatatgtgtcctcaactaacagagttgaactttgccattgatagagagcagttttgaaacactctttttgtggaatctgcaagtggatatttggatagcttggaggatttcgttggaagcgggaattcaaataaaaggtagacagcagcattctcaggaatttctttctgatgtctgcattcaactcatagagttgaagattccctttcatagagcaggtttgaaacactctttctggagtatctggatgtggacatttggagcgctttgatgcctacggtgaaaaagtaaatctcttcccataaaaacgagacagaggattctgagaaacaagtttgtgatgtgtgtactcagctaacagagtggaacctctcttttgatgcagcagtttggaaacactctttttgtagaaactgtaagtggatatttggatagctctaatgatttcgttggaaacgggaatatcatcatctaaaatctagacagaagccctctcagaaactactttgtgatatctgcattcaagtcacagagttgaacattcgctttcttagagcacgtttgaaacactctttttgtagtgtctggaagtggacatttggagcgctttgatgcctttggtgaaaaagggaacgtcttcccataaaaactagacagaagcattctcagaaacttgtttgtgatgtgtgtacccagccaaaggagttgaacatttctattgatagagcagttttgaaacactctttttgtggaaaatgcaagtggatatttggatagcttggaggttttcgttggaagcgggaattcaaataaaaggtagacagcagcattctcagaaatttctttctgatgtctgcattcagctcatagagttgaagattccctttcatagagcaggtttgaaacactctttctggagtatctggttgtggacatttggagcgctttgatgcctacggtgaaaaagtaaatatcttcccataaaaacgagacagaaggattctgagaaacaagtttgtgatgtgtgtactcagctaacagagtggaacctttctttttacagagcagctttgaaactctatttttgtggattctgcaaatggatatttagattgctttaatgatatcgctggaaaagggaatatggtcatacaaaatctagacagaagcattctcacaaacttctttgtgatgtgtgtcctcaactaacagagttgaacctttcttttgatgcagcagtttggaaacactctttttgtagaaactgtaagtggatatttggatagctctaacgatttcgttggaaacgggaatatcatcatctaaaatctagacagaagcactattagaaactacttggtgatatctgcattcaagtcacagagtagaacattcccttacttcgagcacgtttgaaacactcttttggaagaatctggaagtggacatttggagcgctttgatgcctttggtgaaaaggaaacgtcttccaataaaagccagacagaagcattctcagaaacttgttcgtgatgtgtgtactcaactaaaagagttgaacctttctattgatagcgcagttttgaaacactctttttgtggattctgcaagtggatatttggattgctttgaggatttcgttggaagcgggaattcatataaaaactagacagcagcattcccagaaatttctttcggatatttccattcaactcatagagatgaacatggcctttcatagagcaggtttgaaacactctttttgtagtttgtggaagtggacatttcgatcgccttgacgcctacggtgaaaaaggaaatatcttcccataaaaaatagacagaagcattctcagaaacttgttggtgatatgtgtcctcaactaacagagttgaactttgcgattgatagagagcagttttgaaacactctttttgtggaatctgcaagtggatatttggatagcttggaggatttcgttggaagcgggaattcaaataaaaggtagacagcagcattctcagaaatttctttctgatgtctgcattcaactcatagagttgaagattccctttcatagaggaggtttgaaacactctttctggagtatctggacgtggacatttggagcgctttgatgcctatggtgaaaaagtaaatatcttcccataaaaacgagacagaaggattctcagaaacaagtttgtgatgtgtgtactcagctaacagagtggaacctctcttttgatgcagcagtttggaaatactctttttgtagaaactgtaagtggatatttggatagctctaatgatttcgttggaaacgggaatatcatcatctaaaatctagacagaagcactctcagaaactactttgtgatatctgcattcaagtcacagagttgaacattcgctttcttagagcacgttggaaacactctttttgtagtgtctggaagtggacatttggagcgctttgatgcctttggtgaaaaagggaatgtcttcccataaaaactagacagaagcattctcagaaacttgtttgtgatgtgtgtacccagctaaaggagttgaacatttctattgatagagcagttttgaaacactctttttgtggaaaatgcaagtggatatttggatagcttggaggatttcgttggaagcgggatttcaaataaaaggtagacagcagcattctcagaaatttctttctgatgtctgcattcaactcatagagttgaagattccctttcatagagcaggtttgaaacactctttctggagtatctggatgtggacatttggagcgctttgatgcctacggtgaaaaagtaaatatcttcccataaaaacgagagagaaggattctcagaaacaagtttgcgatgtgtgtactcagctaaaagagtggaacctttctttttacagagcagctttgaaactctattgttgtggattctgcaaattgatatttagattgctttaacgatatcgttggaaaagggaataccgtcatacaaaatctagacagaagcattctcacaaacttctttgtgatgtgtgtcctcaactaacagagttgaacctttcttttgatgcagcaatttggaaacacccttttggtagaaactgtaagtggatatttggatagctctaacgatttcgttggaaacgggaatatcatcatctaaaatctagacagaagcactattagaaactacttggtgatatctgcattcaagtcacagagttgaacattcccttactttgagcacgtttgaaacactcttttggaagaatctggaagtggacatttggagcgctttgatgcctttggtgaaaaggaaacgtcttccaataaaagccagacagaagcattctcagaaacttgttggtgatgtatgtactcaactaaaagagttgaacctttctattgatagagcagttttgaaacactctttttgtggattctgcaagtggatatttggattgctttgaggatttcgttggaagcgggaattcatataaaaacaagacagcagcattcccagaaatttctttcggatatttccattcaactcattgagatgaacatcgcctttcatagagcaggtttgaaacactctttttgtagtttgtggaagtggacatttcgatcgccttgacgcctacagtgaaaaaggaaatatcttcccataaaaaatagacagaagcattctcagaaacttgttggtgatatgtgtcctcaactaacagagttgaactttgccattgatagagagcagttttgaaacactctttttgtggaatctgcaagtggatatttggatagcttggaggatttcgttggaagcgggaattcaaataaaaggtagacagcagcattctcagaaatttctttctgatgtctgcattcaactcatagagttgaagattccctttcatagagcaggtttgaaacactctttctggagtatctggatgtggacatttggagcgctttgatgtctacggtggaaacgtaaatatcttcccataaaaacgagacagaaggattctgagaaacaagtttgtgatgtgtgtactcagctaacagagtggaacctctcttttgatgcagcagtttggaaacactctttttgtagaaactgtaagtggatatttggatagctctaatgatttcgttggaaacgggaatatcatcatctaaaatctagacagaagccctctcagaaactactttgtgatatctgcattcaagtcacagagttgaacattcgctttcttagagcacgttggaaacactctttttgtagtgtctggaagtggacatttggagcgctttgttgcctttggtgaaaaagggaacgtcttcccataaaaactagacagaagcattctcagaaacttgtttgtgatgtgtgtacccagccaaagggagttgaacatttctattgatagagcagttttgaaacactctttttgtggaaaatgcaagtggatatttggatagcttggaggatttcgttggaagcgggaattcaaataaaaggtagacagcagcattctcagaaatttctttctgatgtctgcattcaactcatagagttgaagattccctttcatagagcaggtttgaaacactctttctggagtatctggatgtggacatttggagcgctttgatgcctacggtgaaaaagtaaatatcttcccataaaaacgagacagaaggattctgagaaacaagtttgtgatgtgtgtactcagctaacagagtggaacctttctttttacagagcagctttgaaactctatttttgtggattctgcaaatggatatttagattgctttaatgatatcgttggaaaagggaatatcgtcatacaaaatactagacagaagcattctcacaaacttactttgtgatgtgtgtcctcaactaacagagttgaacctttcttttgatgcagcaatttggaaacacccttttggtagaaactgtaactggatatttggatagctctaacgatttcgttggaaaagggaatatcatcatctaaaatgtagacagaaagcactattagaaactacttggtgatatctgcattcaagtcacagagttgaacattcccttactttgagcacgtttgaaacactcttttggaagaatctggaagtggacatttggagcgctttgatgatgcctttggtgaaaaggaaacgtcttccaataaaagccagacagaagcattctcagaaacttgtttgtgatgtgtgtactcaactaaaagagttgaacctttctattgatagagcagttttgaaacactctttttgtggattctgcaagtggatatttggattgctttgaggatttcgttggaagcgggaattcgtataaaaactagacagcagcattcccagaaatttctttcgtatatttccattcaactcatagagatgaacatggcctttcatagagcaggtttgaaacactctttttgtagtttgtggaagtggacatttcgatcgccttgacgcctacggtgaaaaaggaaatatcttcccataaaaaatagacagaagcattctcagaaacttgttggtgatatgtgtcctcaactaacagagttgaactttgccattgatagagagcagttttgaaacactctttttgtggaatctgcaagtggatatttggatagcttggaggatttcgttggaagcgggaattcaaataaaaggtagacagcagcattctcagaaatttctttctgatgtctgcattcaactcatagagttgaagattccctttcataaagcaggtttgaaacactctttctggagtatctggatgtggacatttggagcgctttgaggcctaaggtgagaaagtaaatatcttcccataaaaacgagacagaaaggattctcagaaacaagtttgtgatgtgtgtactcagctaacagagtggaacctctcttttgatgcagcagtttggaaacactctttttgtagaaaccgtaagtggatatttggatagctctaatgatttcgttggaaacgggaatatcatcatctaaaatctagacagaagccctctcagaaactactttgtgatttctgccttcaagtcacagagttgaacattcgctttcttagagcacgttggaaacactctttttgtagtgtctggaagtggacatttggagcgctttgattcctttggtgaaaaagggaatgtctacccataaaaactagacagaagcattctcagaaacttgtttgtgatgtgtgcacccagctaaaggagttgaacatttctattgatagagcagttttgaagcactctttttgtggaaaatgcaagtggatatttggatagcttggaagatttcgttggaagcgggagttcaaataaaaggtagacagcagcattctcagaaatttctttctgattctgcattcaactcatagagttgaagattccttttcatagagcaggtttgaaacactcgttctggagtatctggatgtggacatttggagcgctttgatgcctacagtggaaaagtaaatatcttcccataaaaacgagacagaaggtttctcagaaacaagtttgtgatgtgtgtactcagctaacagagtggaacctttctttttacagagcagctttgaaactctatttttgtggattctgcaaattgatatttagattgctttaacgatatcgttggaaaagggaatatcgtcatacaaaatctagacagaagcattctcacaaacttctttgtgatgtgtgtcctcaactaacagagttgaacctttcttttgatgcagcaatttggaaacacccttttggtagaaactgtaactggatatttggatagctctaacgattttgttggaaacgggaatatcatcatctaaaatgtagacagaagcactattagaaactacttggtgatatctgcattcaagtcacagcagttgaacattcccttactttgagcacgtttgaaacactcttttggaagaatctggaagtggacatttggagcgctttgatgcctttggtgaaaaggaaacgtcttccaatacaagccagacagaagcattctcagaaacttgtttgtgatgtgtgtactcaactaaaagagttgaacctttctattgatagagcagttttgaaacactctttttgtggattctgcaagtggatatttggattcctttgaggatttcgttggaagcgggaattcgtataaaaactagacagcagcattcccagaaatttctttcggatatttccattcaactcatagagatgaacatcgcctttcatagagcaggtttgaaacactctttttgtagtttgtggaagtggacatttcgatcgccttgacgcctacggtgaaaaaggaaatatcttcccataaaaaatagacagaagcattctcagaaacttgttggtgatatgtgtcctcaactaacagagttgaactttgccattgatagagagcagttttgaaacactctttttgtggaatctgcaagtggatatttggatagcttggaggatttcgttggaagcgggaattcaaataaaaggtagacagcagcattctcagaaatttctttctgatgtctgcattcaactcatagagttgaagattccctttcatagagcaggtttgaaacactctttctggagtatctggatgtggacatttggagtgctttgatgcctacggtgaaaaagtaaatatcttcccataaaaacgagacagaaggattctgagaaacaagtttgtgatgtgtgtactcagctaacagagtggaacctctcttttgatgcagcagtttggaaacactctttttgtagaaactgtaagtggatatttggatagctctaatgatttcgttggaaacgggaatatcatcatctaaaatctagacagaagccctctcagaaactactttgtgatatctgcattcaagtcacagagttgaacattcgctttcttagagcacgttggaaacactctttttgtagtgtctggaagtggacatttggagcgctttgatgcctttggtgaaaaagggaatgtcttcccataaaaaccagacagaagcattctcagaaacttgtttgtgatgtgtgcacccagctaaaggagttgaacatttattgatagagcagttttgaagcactctttttgtggaaaatgcaagtggatatttggatagcttggaggatttcgttggaagcgggagttcaaataaaaggtagacagcaggattctgagaaacaagtttgtgatgtgtgtactcagctaacggagtggaacctttctttttacagagcagctttgaaactctatttttgtggattctgcaaattgatatttagattgctttaacgatatcattggaaaagggaatatcgtcatacaaaatctagacagaagcattctcacaaacttctttgtgatgtgtgtcctcaactaacagtagttgaacctttcttttgatgcagcaatttggaaacacccttttggtagaaactgtaactggatatttgcttagctctaacgatttcgttggaaacgggaatatcatcatctaaaatctagacagaagcactattagaaactacttggtgatatctgcattcaagtcacagagttgaacattcccttactttgagcacgtttgaaacactcttttggaagaatctggaagtggacatttggagcgctttgatgcctttggtgaaaaggaaacgtcttccaataaaagccagacagaagcattctcagaaacttgtttgtgatgtgtgtactcaactaaaagagttgaacctttctattgatagagcagttttgaaacactctttttgtggattctgcaagtggatatttggattggttgaggatttcgttggaagcgggaattcgtataaacactagacagcagcattcccagaaatttctttcggatatttccattcgactcatagagatgaacatggcctttcatagagcaggtttgaaacactctttttgtagtttgtggaagtggacatttcgatcgccttgacgcctacggtgaaaaaggaaatatcttcccataaaaaatagacagaagcattctcagaaacttgttggtgatatgtgtcctcaactaacagagttgaactttgccattgatagagagcagttttgaaacactctttttgtggaatctgcaagtggatatttggatagcttggaggatttcgttggaagcgggaattcaaataaagggtagacagcagcattctcagaaatttctttctgatctctgcattcaactcatagagttgaacattccctttcatagggcaggtttgaaatactctttctgtagtatctggatgtggacatttggagcgctttgatgcctacggtgaaaaagtaaatatcttcccataaaaacgagacagaaggattctgagaaacaagtttgtgatgtgtgtactcagctaacagagtggaacctctcttttgatgcagcagtttggaaacactctttttgtagaaactgtaagtggatatttggatagctctaatgatttcgttggaaacgggaatatcatcatctaaaatctagacagaagccctctcagaaactactttgtgatatctgcattcaagtcacagagttgaacattcgctttcttagagcacgtttgaaacactctttttgtagtgtctggaagtggacatttggagggctttgattcctttggtgaaaaagggaatgtctacccataaaaactagacagaagcattctcagaaacttgtttgtgatgtgtgtacccagccaaaggagttgaacatttctattgatagagcagttttgaaacactctttttgtggaaaatgcaggtggatatttggatagcttggaggatttcgttggaagcgggaattcaaataaaaggtagacagcagcattctcagaaatttctttctgatgtctgcattcaactcatagagttgaagattccctttcatagagcaggtttgaaacactctttctggagtatctggatgtggacatttggagcgctttgatgcctacggtgaaaaagtaaatatcttcccataaaaacgagacagaggattctgagagacaagtttgtgatgtgtgtactcagctaacagagtggaacctttctttttacagcagcagctttgaaactctatttttgtggattctgcaaatggatatttagattgctttaatgatatcgctggaaaagggaatatggtcatacaaaatctagacagaagcattctcacaaacttctttgtgatgtgtgtcctcaactaacagagttgaacctttcttttgatgcagcagtttggaaacactctttttgtagaaactgtaagtggatatttggatagctctaacgatttcgttggaaacgggaatatcatcatctaaaatctagacagaagcactattagaaactacttggtgatatctgcattcaagtcacagagttgaacattcccttactttgggcacgtttcaaacactcttttggaagaatctggaagtggacatttggagcgctttgatgcctttggtgaaaaggaaacgtcttccaataaaagccagactgaagcattctcagaaacttgttcgtgatgtgtgtactcaactaaaagagttgaacctttctttggatagcgcagttttgaaacactctttttgtggattctgcaagtggatatttggattgctttgaggatttcgttggaagcgggaattcgtataaacactagacagcagcattcccagaaatttctttcggatatttccattcaactcatagagatgaacatggcctttcatagagcaggtttgaaacactctttttgtagtttgtggaagtggacatttcgatcgccttgacgcctacggtgaaaaaggaaatatcttcccataaaaaatagacagaagcattctcagaaacttgttggtgatatgtgtcctcaactaacagagttgaactttgccattgatagagagcagttttgaaacactctttttgtggaatctgcaagtggatatttggatagcttggaggatttcgttggaagcgggaattcaaataaaaagtagacagcagcattctcagaaatttctttctgatgtctgcattcaactcatagagttgaagattccctttcatagagcaggtttgaaacactctttctggagtatctggatgtggacatttggagcgctttgatgcctacggtgaaaaagtaaatatcttcccataaaaacgacacagaaggattctgagaaacaagtttgtgatgtgtgtactcagctaacagagtggaacctctcttttgatgcagcagtttggaaacactctttttgtagaaactgtaagtggatatttggatagctctaatgatttcgttggaaacgggaatatcatcatctaaaatctagaaagaagccctctcagaaactactttgtgatatctgcattcaagtcacagagttgaacattcgctttcttagagcacgttggaaacactctttttgtagtgtctggaagtggacatttggagcgctttgatgcctttggtgaaaaagggaatgtcttcccataaaaagtagacagaagcattctcagaaacttgtttgtgatgtgtgtacccagctaaaggagttgaacatttctattgatagagcagttttgaaacactctttttgtggaaaatgcaagtggatatttggatagcttggaggatttcgttggaagcgggaattcaaataaaaggtagacagcagcattctcagaaatttctttctgatgtctgcattcaactcacagagttgaagattccctttcatagagcaggtttgaaacactctttctggagtatctggatgtggacatttggagcgctttgatgcctacggtgaaaaagtaaatatcttcccagaaaaacgagacagaaggattctgagaaacaagtttgtgatgtgtgtactcagctaacagagtggaacctttctttttacagagcagctttgaaactctatttttgtggattctgcaaatggatatttagattgctttaacgatatcgttggaaaagggaatatcgtcatacaaaatctagacagaagcattctcacaaacttctttgtgatgtgtgtcctcaactaacagagttgaacctttcttttgatgcagcagtttggaaacacccttttggtagaaactgtaagtggatattttgatagctctaacgatttcgttggaaacgggaatatcatcatctaaaatctagacagaagcactattagaaactacttggtgatatctgcattcaagtcaaagagttgaacattcccttactttgagcacgtttgaaacactcttttggaagaatctggaagtggacatttggagcgctttgatgcctttggtgaaaaggaaacgtcttccaataaaagccagacagaagcattctcagaaacttgttggtgatgtgtgtactcaactaaaagagttgaacctttctattgatagagcagttttgaaacactctttttgtggattctgcaagtggatatttggattgctttgaggctttcgttggaagcgggaattcatataaaaactagacagcagcattcccagaaatttctttcggatatttccattcgactcatagagatgaacatggcctttcatagagcaggtttgaaacactctttttgtagtttgtggaagtggacatttcgatcgccttgacgcctacggtgaaaaaggaaatatcttcccataaaaaatagacagaagcattctcagaaacttgttggtgatatgtgtcctcaactaacagagttgaactttgccattgatagagagcagttttgaaacactctttttcctgaatctgcaagtggatatttggatagcttggaggatttcgttggaagcgggaattcaaataaaaggtagacagcagcattctcagaaatttctttctgatgtctgcattcaactcatagagttgaacattccctttcatagagcaggtttgaaacactcgttctggagtatctggatgtggacatttggagcgctttgatgcctacggtgaaaaagtaaatatcttcccataaaaacgagacagaaggattctcagaaacaagtttgtgatgtgtgtactcagctaacagagtggaacctctcttttgatgcagcagtttggaaacactctttttgtggaaactgtaagtggatatttggatagctctaatgatttcgttggaaacgggaatatcatcatctaaaatctagacagaagcactctcagaaactactttgtgatatctgcattcaagtcacagagttgaacatttgctttcttagagcacgtttgaaacactctttttgtagtgtctggaagtggacatttggagcgctttgatgcctttggtgaaaaagggaacgtcttcccataaaaactagacagaagcattctcagaaacttgtttgtgatgtgtgtacccagctaaaggagttgaacatttctattgatagagcagttttgaaacactctttttgtggaaaatgcaagtggatatttggatagcttggaggatttcgttggaagcgggatttcaaataaaaggtagacaacagcattctcagaaatttctttctgatgtctgcattcaactcatagagttgaagattccctttcatagagcaggtttgaaacactctttctggagtatctggatgtggacatttggagcgctttgatgcctaaggtgaaaaagtaaatatcttcccataaaaacgagacagaaggattctcagaaacaagtttgtgatgtgtgtactcagctaacagagtggaaccattctttttacagagcagctttgaaactctatttttgtggattctgcaaatggatatttagattgctttaacgatatcgttggaaaagggaatatcgtcatacaaaatctggacagaagcattctcacaaacttctttgtgatgtgtgtcctcaactaacagagttgaacctttcttttgatgcagcagtttggaaacactctttttgtagaaactgtaagtggatatttggatagctctaacgatttcgttggaaacgggaatatcatcatctaaaatctagacagaagcactattagaaactacttggtgatatctgcattcaagtcaaagagttgaacattcccttactttgagcacgtttgaaacactcttttggaagaatctggaagtggacatttggagcgctttgatgcctttggtgaaaaggaaacgtcttccaataaaagccagacagaagcattctcagaaacttgtttgtgatgtgtgtactcaactaaaagagttgaacctttctattgatagagcagttttgaaaccctctttttgtggattctgcaagtggatatttggattgccttgaggatttcgttggaagcgggaattcgtataaacactagacagcagcattcccagaaatttctttcggatatttccattcaactcatagagatgaacatggcctttcatattgaaacactctttttgtagtttgtggaagtggacatttcgatcgccttgacgcctacggtgaaaaaggaaatatcttcccataaaaaatagacagaagcattctcagaaacttgtttgtgatgtgtgtacccagctaaaggagttgaacgtttctattgatagagcagttttgaaacactctttttgtggaaaatgcaagtggatatttgaatagcttggaggatttcgttggaagcgggaattcaaataaaaggtagacagcaggattctgagaaacaagtttgtgatgtgtgtactcagctaacagagtggaacctgtcttttgatgcagcagtttggaaacactctttttgtagaaactgtatgtggatatttggatagctctaatgatttcgttggaaacgggaatatcatcatctaaaatctagacagaagccctctcagaaactactttgtgatatctgcattcaagtaacagagttgaacattcgctttcttagagcacgttggaaacactctttttgtagtgtctggaagtggacatttggagcactttgatgcctttggtgaaaaagggaacgtcttcccataaaaagtagacagaagcattctcagaaacttgtttgtgatgtgtgtacccagccaaaggagttgaacatttctattgatagagcagttttgaaacgctctttttgtggaaaatgcaggtggatatttggatagcttggaggatttcgttggaagcgggaattcaaataaaaggtagacagcagcattctcagaaatttctttctgatgtctgcattcaactcatagagttcaagattccctttcatagagcaggtttgaaacactctttctggagtatctggatgtggacatttggagcgctttgatgcctacggtgaaaaagtaaatatcttcccataaaaacgagacagaaggattctcagaaacaagtttgtgatgtgtgtactcagctaacagagtggaacctttctttttacagagcagctttgaaactctatttttgtggattctgcaaatggatatttagattgctttaatgatatcgctggaaaagggaatatggtcatacaaaatctagacagaagcattctcacaaacttctttgtgatgtgtgtcctcaactaacagagttgaacctttcttttgatgcagcagtttggaaacactctttttgtagaaactgtaagtggatatttggatagctctaacgatttcgttggaaacgggaatatcatcatctaaaatctagacagaagcactattagaaactacttggtgatatctgcattcaagtcacagagttgaacattcccttacttcgagcacgtttgaaacactcttttggaagaatctggaagtggacatttggagcgctttgatgcctttggtgaaaaggaaacgtcttccaataaaagccagacagagcattctcagtaaacttgtttgtgatgtgtgtactcaactaaaagagttgaacctttctattgatagagcagttttgaaacactctttttgtggattctgcaagtggatatttggattgctttgaggatttcgttggaagcggcaattcgtataaaaactagacagcagcattcccagaaatttctttcggataattcccattcgactcatagagatgaacatggcctttcatagagcaggtttgaaacactctttttgtagtttgtggaagtggacatttcgatcgccttgacgcctacggtgaaaaaggaaatatcttcccataaaaaatagacagaagcattctcagaaacttgttggtgatatgtgtcctcaactaacagagttgaactttgccattgatagagagcagttttgaaacactctttttgtggaatctgcaagtggatatttggatagcttggaggatttcgttggaagcgggaattcaaataaaaggtagacagcagcattctcagaaatttctttctgatgtctgattcagctcatagagttgaagattccctttcatagagcaggtttgaaacactctttctggagtatctggatgtggacatttggagcgctttgaggcctacggtgagaaagtaaatatcttcccataaaaacgagacagaaggattctgagaaacaagtttgtgttgtgtgtactcagctaacagagtggaacctctcttttgatgcagcagtttggaaacactctttttgtagaaactgtaagtggatatttggatagctctaatgatttcgttggaaacgggaatatcatcatctaaaatctagacagaagccctctcagaaactactttgtgatatctgcattcaagtcacagagttgaacattcgctttcttagagcacgtttgaaacactctttttgtagtgtctggaagtggacatttggagcgctttgatgcctttggtaaaaaagggaatgtcttcccataaaaactagacagaagcattctcagaaacttgtttgtgatgtgtgtacccagctaaaggagttgaacatttctattgatagagcagttttgaaacactctttttgtggaaaatgcaagtggatatttggatagcttggaggatttcgttggaagcgggaattcaaataaaaggtagacagcagcattctcagaaatttctttctgatgtctgcattcaactcatagagttgaagattccctttcatagagcaggtttgaaacactctttctggagtatctggatgtggacatttggagggctttgatgcctacggtgaaaaagtaaatatcctcccataaaaacgagacagacaaggattctgagaaacaagtttgtgatgtgtgtactcagctaacagagtggaacctctcttttgatgcagcagtttggaaacactctttttgtagaaactgtaagtggatatttggatagctctaatgatttcgttggaaacgggaatatcatcatctaaaatctacacagaagcattctcacaaacttctttgtgatgtgtgtcctcaactaacagagttgaacctttcttttgatgcagcagtttggaaacactctttttgtagaaactgtaagtggataattggatagctgtaacgatttcgttggaaacgggaatatcgtcatctaaaatttagacagaagcactattagaaactacttggtgatatctgcattcaagtcacagagttgaacattcccttactttgagcacgtttcaaacactcttttggaagaatctggaagtggacatttggagcgctttgatgcctttggtgaaaaggaaacgtcttccaataaaagccagacagaagcattctcagaaacttgttcgtgatgtgtgtactcaactaaaagagttgaacctttctattgatagagcagttttgaaacactctttttgtggattctgcaagtggatatttggattgctttgaggatttcgttgtaagcgggaattcgtataaaaactagacagccagcattcccagaaatttctttcggatatttccattcgactcatagagatgaacatggcctttcatagagcaggtttgaaacactctttttgtagtttgtggaagtggacatttcgatcgccttgacgcctacggtgaaaaaggaaatatcttcccataaaaaatagacagagcattctcagaaacttgttggtgatatgtgtcctcaactaacagagttgaactttgccattgatagagagcagttttgaaacactctttttgtggaatctgcaagtggatatttggatagcttggaggatttcgttggaagcgggaattcaaataaaaggtagacagccagcattctcagaaatttctttctgatgtctgcattcaactcatagagttgaacattccctttcatagagcaggtttgaaatactctttctgtagtatctggatgtggacatttggagcgctttgatgcctacggtgaaaaagtaaatatcttcccataaaaacgagacagaaggattctgagaaacaagtttgtgatgtgtgtactcagctaacagagtggaacctctcttttgatgcagcagtttggaaacactctttttgtagaaactgtaagtggatatttggatagctctaatgattttgttggaaacgggaatatcatcatctaaaatctagacagaagccctctcagaaactactttgtgatatctgcattcaagtcacagagttgaatattcgctttcttagagcacgttggaaacactctttttgtagtgtctggaagtggacatttggagcgctttgatgcctttggtgaaaaagagaacgtcttcccataaaaactagacagaagcattctcagaaacttgtttgtgatgtgtgtacccagccaaaggagttgaacatttctattgatagagcagttttgaaacactcttgttgtggaaaatgcaggtggatatttggatagcttggaggatttcgttggaagcgggaattcaaataaaaggtacacagcagcattctcagaaatttctttctgatgtctgcattcaactcatagagttgaagattccctttcatagagcaggtttgaaacactctttctggagtatctggatgtggacatttggagcgctttgatgcctacggtgaaaaagtaaatatcttcccataaaaacgagacagaaggattctcagaatcaagtttgtgatgtgtgtactcagctaacagagtggaacctttctttttacagagcagctttgaaactctatttttgtggattctgcaaattgatatttagattgctttaacgatatcgttggaaaagggaatatcgtcatacaaaatctagacagaagcattctcacaaacttctttgtgacgtgtgtcctcaactaacagagttgaacctttcttttgatgcagcagtttggaaacactgtttttgtagcaactgtaagtggatatttggatagctctaacgatttcgttggaaacgggaatatcatcatctaaaatctagacagaagcactattagaaactacttggtgatatctgcattcaagtcaaagagttgaacattcccttactttgagcacgtttgaaacactcttttggaagaatctggaagtggacatttggagcgctttgatgcctttggtgaaaaggaaacgtcttccaataaaagccagacagaagcattctcagaaacttgtttgtgatgtgtgtactcaactaaaagagttgaacctttctattgatagagcagttttgaaacactctttttgtggattctgcaattggatatttggattgctttgaggatttcgttggaagcgggaattcgtataaaaactagacagcagcattcccagaaatttctttcggatatttccattcgactcatagagatgaacatggccgttcatagagcaggtttgaaacactctttttgtagtttgtggaagtggacatttcgatcgccttgacgcctacggtgaaaaaggaaatatcttcccataaaaaatagacagaagcattctcagaaacttgttggtgatatgtgtccttaactaacagagttgaactttgccattgatagagagcagttttgaaacactctttttgtggaatctgcaagtggatatttggatagcttggaggatttcgttggaagcgggaattcaaataaaaggtagacagcagcagtctcagaaatttctttctgatgtctgcattcaactcatagagttgaacattccctttcatagagcaggtttgaaacactctttctggagtatctggatgtggacatttggagcgctttgatgcctacggtgaaaaagtaaatatcttcccataaaaacgagacagaaggattctgagaaacaagtttgtgatgtgtgtactcagctaacagagtggagcctctcttttgatgcagcagtttggaaacactctttttgtagaaactgtaagtggatatttggatagctctaatgatttcgttggaaacgggaatatcatcatctaaaatctagacagaagccctctcagaaactactttgtgatatctgcattcaagtcacagagttgaacattcgctttcttagagcacgttggaaacactctttttgtagtgtctggaagtggacatttggagcgctttgattcctttggtgaaaaagggaatgtctacccataaaaactagacagaagcattctcagaaacttgtttgtgatgtgtgtacccagccaaaggagttgaacatttctattgatagagcaggtttgaaacactctttttgtggaaaatgcaggtggatatttggatagcttggtggatttcgttggaagcgggaattcaaataaaaggtagacagcagcattctcagaaatttctttctgatgtctgcattcaactcatagagttgaagattccctttcatagagcaggtttgaaacactcgttctggagtatctggatgtggacatttggagcgctttgatgcctacggtggaaaagtaaatatcttcccataaaaacgagacagaaggattctgagaaacaagtttgtgatgtgtgtactcagctaacggagtggaacctttctttttacagagcagctttgaaagtctatttttgtggattctgcaaattgatatttagattgctttaacgatatcgttggaaaagggaatatcctcatacaaaatctagacagaagcattctcacaaacttctttgtgacgtgtgtcctcaactaacagagttgaacctttcttttgatgcagcagtttggaaacactgtttttgtagcaactgtaagtggatatttggatagctctaacgatttcgttggaaacgggaatatcatcatctaaaatctagacagaagcactattagaaactacttggtgatatctgcattcaagtcacagagttgaacattcccttactttgagcacgtttgaaacactcttttggaagtatctggaagtggacatttggagcgctttgatgcctttggtgaaaaggaaacgtcttccaataaaagccagacagaagcattctcagaaacttgttcgtgatgtgtgtactcaactaaaagagttgaacctttctattgatagagcagttttgaaacactctttttgtggattctgcaagtggatatttggattgctttgaggatttcgttggaagcgggaattcgtataaacactagacagcagcattcccagaaatttctttcggatatttccattcaactcatagagatgaacatgggctttcatagagcaggtttgaaacactctttttgtagtttgtggaagtggacatttcgatcgccttgacgcctacggtgataaaggaaatatcttcccataaaaaatagacagaagcattctcagaaacttgttggtgatatgtgtcctcaactaacagagttgaactttgccattgatagagagcagttttgaaacactctttttgtggaatctgcaagtggatatttggatagcttggaggatttcgttggaagcgggaattcaaataaaaggtagacagcagcattctcagaaatttctttctgatgtctgcattcaactcatagagttgaagattccctttcatagagcaggtttgaaacactctttctggagtatctggatgtggacatttggagcgctttgatgcctacggtgagaaagtaaatatcttcccataaaaacgagacagaaggattctgagaaacaagtttgtgatgtgtgtactcagctaacagattggaacctctcctttgatgcagcagtttggaaacactctttttgtagaaactgtaagtggatatttggatagctctaatgatttcgttggaaacgggaatatcatcatctaaaatctagacagaagcactctcagaaactactttgtgatatctgcattcaagtcacagagttgaacattcgctttcttagagcacgtttgaaacactctttttgtagtgtctggaagtggacttttggagcgctttgattcctttggtgaaaaagggaatgtctacccataaaaactagacagaagcattctcagaaacttgtttgtgatgtgtgtacccagccaaaggagttgaacatttctattgatagagcagttttgaaacactctttttgtggaaaatgcaggtggatatttggatagcttggaggatttcgttggaagcgggaattcaaataaaaggtagacagcagcattctcagaaatttctttctgatgtctgcattcaactcatagagttgaacattccctttcatagagcaggtttgaaacactctttctggagtatctggatgtggacatttggagccctttgatgcctacggtgaaaaagtaaatatcttcccataaaaacgagacagaaggattctcagaaacaagtttgtgatgtgtgtactcagctaacagagtggaacctttctttttacagagcagctttgaaactctatttttgtggattctgcaaatggatatttagattgctttaacgatatcgttggaaaagggaatatcgtcatacaaaatctagacagaagcattctcacaaacttctttgtgatgtgtgtcctcaactaacagagttgaacctttcttttgatgcagcagtttggaaacacccttttggtagaaactgtaactggatatttggatagctctaacgatttcgttggaaacgggaatatcatcatctaaaatctagacaggagcactattagaaactacttggtgatatctgcattcaagtcacagagttgaacattcccttactttgagcacgtttcaaacactcttttggaagaatctggaagtggacatttggagcgctttgatgcctttggtgaaaaggaaacgtcttccaataaaagccagacagaagcattctcagaaacttgtttgtgatgtgtgtactcaactaaaagagttgaacctttctattaatagagcagttttgaaacactctttttgtggattctgcaagtggatatttggattgctttgaggatttcgttggaagcgggaattcgtataaaaactagacagcagcattcccagaaatttctttcggatatttccattcaactcatagagatgaacatggcctttcatagagcaggtttgaaacactctttttgtagtttgtggaagtggacatttcgatcgccttgacgcctacggtgaaaaaggaaatatcttcccataaaaaatagacagaagcattctcagaaacttgtttgtgatgtgtgtacccagctaaaggacttgaacatttctattgatagagcagttttgaaacactctttttgtggaatctgcaggtggatatttggatagcttggaggatttcgttggaagcgggaattcaaataaaaggtagacagcagcattctcagaaatttctttctgatgtctgcattcaactcatagagttgaagattccctttcatagagcaggtttgaaacactctttctggagtatctggatgtggacatttgtagcgctttgatgcctacggtgaaaaggtaaatatcttcccataaaaacgagacagaaggattctcagaaacaagtttgtgatgtgtgtactcagctaacagagtggaacctctcttttgacacagcagtttggaaacactctttttgtagaaactgtaagtgcacatttggatagctctaatgacttcgttggaaacgggaatatcatcatctaaaatctagacagaagcactctcagaaactactttgtgatatctgcattcaagtcacagagttgaacattcgctttcttacagcacttttgaaacacactttttgtagtatctggaagtggacatttggagcgctttgatgcctttggtgaaaaaggaaatgtcttcccataaaaactagacagaagcattctcagaaacttgtttgtgatgtgtgtacccagccaaaggagttgaacatttctattgatagagcagttttgaaacactctttttgtggaaaatgcaagtggatatttggatagcttggaggatttcgttggaagcgggaattcaaataaaaggtagacagccagcattctcagaaatttctttctgatgtctgcattcaactcatagagttgaagattccctttcataggagcaggtttgaaacactctttctggagtatctggatgtggacatttggagcgctttgatgcctacggtgaaaaagtaaatatcttcccagaaaaacgagacagaggattctgagaaacaagtttgtgatgtgtgtactcagctaacagagtggaacctctctttggatgcagcagtttggaaacacactttttgtagaaactgtaagtggatatttggatagctctaatgatttcgttggaaacgggaatatcatcatctaaaatctagacagaagcattctcacaaacttctttgtgatgtgtgtcctcaactaacagagttgaacctttcttttgatgcagcaatttggaaacacccttttggtagaaactgtaactggatatttgcttagctctaacgatttcgttggaaacgggaatatcatcatctaaaatgtagacagaagcactattagaaactacttggtgatatctgcattcaagtcacagagttgaacattcccttactttgagcacgtttgaaacactcttttggaagaatctggaagtggacatttggagcgctttgatgcctttggtgaaaaggaaacgtcttccaataaaagccagacagaagcattctcagaaacttgttggtgatgtgtgtactcaactaaaagagttgaacctttctattgatagagcagttttgaaacactctttttgtggattctgcaagtggatatttggattgctttgaggatttcgttggaagcgggaattcgtataaacactagacagccagcattcccaggaaatttctttcggatatttccattcaactcatagcaggatgaacatggcctttcatagagcaggtttgaaacactctttttgtagtttgtggaagtggacatttcgatcgccttgacgcctacgctgaaaaaggaaatatcttcccataaaaaatagacagagcattctcagaaacttgttggtgatatgtgtcctcaactaacagagttgaactttgccattgatagagagcagttttgaaacactctttttgtggaatctgcaagtggatatttggatagcttggaggatttcgttggaagcgggaattcgtataaaaactagacagcagcattctcagaaatttctttctgatgtctgcattcaactcatagagttgaagattccctttcatagagcaggtttgaaacactctttctggagtatctggatgtggacatttggagcgctttgatgcctatggtgaaaaagtataatcttcccataaaaacgagacagaaggattctgagaaacaagtttgtgatgtgtgtactcagctaacagagtggaacctctcttttgatgcagcagtttggaaacactctttttgtagaaactgtaagtggatatttggatagctctaatgatttcgttggaaacgggaatatcatcatctaaaatctagacagaagcactctcagaaactactgtgtgatatctgcattcaagtcacagagttgaacattccctttcttagagcacgtttgaaacactctttttgtagtgtctggaagtggacatttggagcgctttgattcctttggtgaaaaagggaatgtctacccataaaaactagacagaagcattctcagaaacttgttggtgatatgtgtcctcaactaacagagttgaactttgccattgatagagagcagttttgaaacactctttttgttgaatctgcaagtggatatttggatagcctggaggatttcgttggaagcgggaattcaaataaaaggtagacagcagcattctcagaaatttctttctgatgtctgcattcaactcatagagttgaagattccctttcatagagcaggtttgaaacactctttctggagtatctggatgtggacatttggagcagctttgatgcctacagtgaaaaagtaaatatcttcccataaaaaccgagacagaaggattctcagaaacaagtttgtgatgtgtgtactcagctaacagagtggatcctttctttttacagagcagctttgaaactctatttctgtggattctgcaaattgatatttgggttgatttaacgatatcgatggaaaagggaatatcttcattcaaaatctagacagaagcattctcacaaacttctttgtgatgtgtgtcctcaactaacagtagttgaacctttcttttgatgcagcagtttggaaacactctttttgtagaaactgtaagtggatatttggatagctctaacgatttcgttggaaacgggaatatcatcatctaaaatctagacagaagcactattagaaactacttggtgatatctgcattcaagtcacagagttgaacattcccttacattgagcacgtttgcaacactcttttggaagaatctggaagtggacatttggagcgctttgatgcctttggtgaaaaggaaacgtattccaataaaagccagacagaagcattctcagaaacttgtttgtgaagtgtgtactcaactaaaagagttgaacctttctattgatagagcagttttgaaacactctttttgtggattctgcaagtggatatttggattgctttgaggatttcgttggaagcgggaattcgtataaaaactagacagcagcattcccagaaatttctttcggatatttccattcaactcatagagatgaacatggcctttcatagagcaggtttgaaacactctttttgtagtttgtggaagtggacatttcgatcgccttgacgcctacggtgaaaaaggaaatatcttcccataaaaaatagacagaaagcattctcagaaacttgtttgtgatgtgtgtacccagctaaaggacttgaacgtttctattgatagagcagttttgaaacactctttttgtggaaaatgcaagtggatgtttggatagcttggaggatttcgttggaagcgggaattcaaataaaaggtagacagcagcattctcagaaatttctttctgatgtctgcattcaactcatagagttgaacattccctttcatagagcaggtttgaaatactctttctgtagtatctggatgtggacatttggagcgctttgaggcctacgatgaaaaagtaaatatcttcccataaaaacgagacagaaggattctgagaaacaagtttgtgatgtgtgtactcagctaacagagtggaacctctcttttgatgcagcagtttggaaacactctttttgtagaaactgtaagtggatatttggatatctctaatgatttcgttggaaacgggaatatcatcatctaaaatctagacagaagccctctcagaaactactttgtgatatctgcattcaagtcacagagttgaacattcgctttcttagggcacgttggaaacactctttttgtagtgtctggaagtggacatttggagcgctttgatgcctttggtgaaaaagggaacgtcttcccataaaaactagacagaaagcattctcagaaacttgtttgtgatgtgtgtacccagccaaaggagttgaacatttctattgatagagcagttttgaaacactctttttgtggaaaatgcaagtggatatttggatagcttggaggatttcgttggaagcgggaattcaaataaaaggtagacagcagcattctcagaaatttctttctgatgtctgcattcaactcatagagttgaagattccctttcatagagcaggtttgaaacactcgttctggagtatccggatgtggacatttggagcgctttgatgcctacggtggaaaagtaaatatcttcccataaaaacgagacagaaggattctcagaaacaagtttttgatgtgtgtactcagccaaaagagtggaacctttctttttacagagcagctttgaaactgtatttttgtggattctgcaaatttatatttagattgttttaacgatatcgttggaaaagggaatatcgtcatacaaaatctagagagaagcattctcacaaacttctttctgatgtgtgtcctcaaccaacagagttgaacctttcttttgatgcagcagtttggaaacactctttttgtagaaactgtaactggatatttggatagctctaacgatttcgttggaaacgggaatatcatcatctaaaatctagacagaagcactattagaaactacttggtgatatctgcattcaagtcacagagttgaacattcccttactttgagcacgtttgaaacactcttttggaagaatctggaagtggacatttggagcgaattgatgcctttggtgaaaaggaaacgtcttccaataaaagccagacagaagcattctcagaaacttgttcgtgatgtgtgtactcaactaaaagagttgaacctttctattgatagagcagtttagaaacactctttttgtggattctgcaagtggatatttagattgctttgaggatttcgttggaagcgggaattcgtataaacactagacagcagcattcccagaaatttctttcggatatttccattcgactcatagagatgaacatggcctttcatagagcaggtttgaaacactctttttgtagtttgtggaagtggacatttcgatcgccttgacgcctacggtgaaaaaggaaatatcttcccataaaaaatagacagaagcattctcagaaacttgttggtgatatgtgtcctcaactaacagagttgaactttgccattgatagagagcagttttgaaacactctttttgtcgaatctgcaagtggatatttggatagcttggaggatttcgttggaagcgggaattcaaataaaaggtagacagcagcattctcagaaatttctttgtgatgtttgcattcaactcatagagttgaacattccctttaatagagcaggtttgaaacactctttctgtactatctggatgtggacatttggagcactttgaggcctacggtgaaaaaggaaatgtcttcccataaaaaattgaagaaggattctgagaaacaagtttgtgatgtgtgtactcagctaacagtggaacctctcttttgatgcagcagtttggaaacactctttttgtagaaactgtaagtggatatttggatagctctaatgatttcgttggaaacgggaatatcatcatctaaaatctagacagaagccctctcagaaactactttgtgatatctgcattcaagtcacagagttgaacattcgctttctttgagcacgttggaaacactctttttgtagtgtctggaagtggacttttggagcgctttgatgcctttggtgaaaaagggaacgtcttcccataaaaactagacagaagcattctcagaaacttgtttgtgatgtgtgtacccagccaaaggagttgaacatttctattgatagagcagttttgaaacgctctttttctggaaaatgcaggtggatatttggatagcttggaggatttcgttggaagcgggaattcaaataaaaggtagacagcaggattctcagaaacaagtttgtgatgtgtgtactcagctaacagagtggaacctttctttttacagagcagctttgaaactctattgttgtggattctgcaaattgatatttagattgctttaacgatatcgttggaaaagggaataccgtcatacaaaatctagacagaagcattctcacaaacttctttgtgacgtgtgtcctcaactaacagagttgaacctttcttttgatgcagcagtttggaaacactgtttttgtagcaactgtaagtggatatttggatagctctaacgatttcgttggaaacgggaatatcatcatctaaaatctagacagaagcactattagaaactacttggtgatatctgcattcaagtcacagagttgaacattcccttactttgagcacgtttgaaacactcttttggaagaatctggaagtggacatttggagcgctttgatgcctttggtgaaaagggaaacgtcttccaataaaagccagacagaagcattctcagaaacttgttcgtgatgtgtgtactcaactaaaagagttgaacctttctattgatagagcagttttgaaacactctttttgtggattctgcaagtggatatttggattgctttgaggatttcgttggaagcgggaattcgtataaacactagacagcagcattcccagaaatttctttcggatatttccattcgactcatagagatgaacatggcctttcatagagcaggtttgaaacactctttttgtagtttgtggaagtggacatttcgatcgccttgacgcctacggtgaaaaaggaaatatcttcccataaaaaatagacagaagcattctcagaaacttgttggtgatatgtgtcctcaactaacagagttgaactttgccattaatagagagcagttttgaaacactctttttgtggaatctgcaagtggatatttggatagcttggaggatttcgttggaagcgggaattcaaataaaaggtagacagcagcattctcagaaatttctttctgatgtctgcattcaactcatagagttgaacattccctttcatagagcaggtttgaaacactctttctggagtatctggatgtggacatttggagcgctttgatgcctacggtgaaaaagtaaatatcttcccataaaaacgagacagaaggattctgagaaacaagtttgtgatgtgtgtactcagctaacagagtggaacctctcttttgatgcagcagtttggaagcactctttttgtagaaactgtaagtggatatttggaagctctaatgattttgttggaaacgggaatatcatcatctaaaatctagacagaagcactctcagaaactactttgtgatatctgcattcaagtcacagagttgaacattcgctttcttagagcacgtttgaaacactctttttgtagtgtctggaagtggacatttggagcgctttgattcctttggtgaaaaagggaatgtctacccataaaaactagacagaagcattctcagaaacttgtttgtgatgtgtgtacccagccaaaggagttgaacatttctattgatagagcagttttgaaacgctctttttgtggaaaatgcaggtggatatttggatagcttggaggatttcgttggaagcgggaattcaaataaaaggtagacagcagaattctcagaaatttctttctgatgtcttcattcaactcatagagttgaagattccctttcatagagcaggtttgaaacactctttctggagtatctggatgtggacatttggagcgctttgatgcctacggtggaaaagtaaatatcttcccataaaaacgagacagaaggattctcagaaacaagtttgtgatgtgtgtactcagctaacagagtggatcctttctttttacagagcagctttgaaactctatttctgtggattctgcaaattgatatttgtgttgatttaacgatatcgttggaaaagggaatatcttcatacaaaatctagacagaagctttctcagaaacttctttgtgatgtgtgtcctcaactaacagagttgaacctttcttttgatgcagcagtttggaaacactctttttgtagaaactgtaagtggatatttggataggtctaacgatatcgttggaaacgggaatatcttcatctaaagtatacacagaagcactattagaaactacttggtgatatctgcattcaagtcacagagttgaacattcccttactttgagcacgtttcaaacactcttttggaagaatctggaagtggacatttggagcgctttgatgcctttggtgaaaaggaaacgtcttccaataaaagccagacagaagcattctcagaaacttgtttgtgatgtgtgtactcaactaaaagagttgaacctttctattgatagcgcagttttgaaacactctttttgtggattctgcaagtggatatttggattgctttgaggatttcgttggaagcgggaattcgtataaaaattagacagcagcattcccagaaatttctttcggatatttccattcaactcatagagatgaacatggcctttcatagagcaggtttgaaacactctttttgtagtttgtggaagtggacatttcgatcgccttgacacctacgctgaaaaaggaaatatcttcccataaaaaatagacagaagcattctcagaaacttgttggtgatatgtgtcctcaactaacagagttgaactttgccattgatagagagcagttttgaaacactctttttgtggaatctgcaagtggatatttggatagcttggaggatttcgttggaagcgggaattcaaataaaaggtagacagcagcattctcagaaatttctttctgatgtctgcattcaactcatagatttgaagattccctttcatagagcaggtttgaaacactctttctggagtatctggatgtggacatttggagcgctttgatgcctacggtgagaaagtaaatatcttcccataaaaacgagacagaaggattctgagaaacaagtttgtgatgtgtgtactcagctaacagagtggaacctctgttttgatgcagcagtttggaaacactctttttgtagaaactgtaagtggatatttggatagctctaatgatttcgttggaaacgggaatatcatcatctaaaatctagacagaagcactctcagaaactactttgtgatatctgcattcaagtcacagagttgaacattcgctttcttagagcacgtttgaaacactctttttgtagtgtctggaagtggacatttggagcgctttgattcctttggtgaaaaagggaatgtctacccataaaaactagacagaagcattctcagaaacttgtttgtgatgtgtgtacccagccaaaggagttgaacatttctattgatagagcagttttgaaacactctttttgtggaaaatgcaggtggatatatggatagcttggaggatttcgttggaagcgggaattcaaataaaaggtagacagcagcattctcagaaatttctttctgatgtctgcattcaactcatagagttgaagattccctttcatagagcaggtttgaaacactctttctggagtatctggatgtgtacatttggagcgctttgatgcctacggtgaaaaagtaaatatcttcccataaaaacgagacagaaggattctgagaaacaagtttgtgatgtgtgtactcagctaacagagtggaacctttctttttacagagcagctttgaaactctatttttgtggattctgcaaatggatatttagattgctttaatgatatcgctggaaaagggaatatggtcatacaaaatctagacagaagcattctcacaaacttctttgtgatgtgtgtcctcaactaacagagttgaacctttcttttgatgcagcagtttggaaacactctttttgtagaaactgtaagtggatatttggatagctctaacaatttcgttggaaacgggaatatcatcatctaaaatctagacagaagcactattagaaactacttggtgatatctgcattcaagtcacagagttgaacattcccttactttgagcacgtttcaaacactcttttggaagaatctggaagtggacatttggagcgctttgatgcctttggtgaaaaggaaacgtcttccaataaaagccagacagaagcattctcagaaacttgttcttgatgtgtatactcaactaaaagagttgaacctttctattgatagagcagttttgaaacactctttttgtggattctgcaagtggatatttggattgctttgaggatttcgttggaagcgggaattcgtataacaactagacagcaacattcccagaaatttctttcggatatttccattcaactcatagagatgaacatggcctttcatagagcaggtttgaaacactctttttgtagtttgtggaagtggacatttcgatcgccttgacgcctacggtgaaaaaggaaatatcttcccataaaaaatagacagaagaattctcagaaacttgtttgtgatgtgtatcctcaactgacagagttgaaccttgccattgatagagcagtttagaaacactctttttgtggaatctgcaagtggatatttggatagcctggaggatttcgttggaagcgggaattcaaatgaaaggtagacagcagcattctcagaaatttctttgtgacgtttgcattcaactcatagagttgaacattccctttcatagagcaggtttgaaacgctctttctgtactatctggatgtggacatttggaacgctttgatgcctacggtgaaaaagaaaatatcttcccataaaagctagacagaaggattctgagaaacaagtttgtgatgtgtgtactcagctaacagagtggaacctctcttttgatgcagcagtttggaaacactctttttgtagaaactgtaagtggatatttggatagctctaatgatttctttggaaacggggaatatcatcatctaaaatctagacagaagcactattagaaactactttgtgatatctgcattcaagtcacagagttgaacattcgctttcttagagcacgttggaaacactctttttgtagtgtctggaagtggacatttggagcgctttgatgcctttggtgaaaaagggaatgtattcccataaaaactagacagaagcattctcagaaacttgtttgtgatgtgtgtacccagctaaaggagttgaacatttctattgatagagcagttttgaaacactctttttgtggaaaatgcaagttgatatttggatagcttggaggatttcgttggaagcgggaattcaaataaaaggtagacagcagcattctcagaaatttctttctgatgtctgcattcaactcatagagttgaagattccctttcatagagcaggtttgaaacactcgttctggagtatctggatgtggacatttggagcgctttgatgcctaccgtggaaaagtaaatatcttcccataaaaacgagacagaaggattctcagaaacaagtttgtgatgtgtgtactcagctagcagagtggaacctttctttttacagagcagctttgaaactctattgttgtggattctgcaaattgatatttagattgctttaacgatatcgttggaaaagggaataccgtcatacaaaatctagacagaagcattctcacaaacttctttgtgacgtgtgtcctcaactaacagagttgaacctttcttttgatgcagcagtttggaaacactgtttttgtagcaactgtaagtggatatttggatagctctaacgatttcgttggaaaccgggaatatcatcatctaaaatctagacagaagcactattagaaactacttggtgatatctgcattcaagtcacagagttgaacattcccttactttgagcacgtttcaaacactcttttggaagaatctggaagtggacatttggagcgctttgatgcctttggtgaaaaggaaacgtcttccaataaaagccagacagaaacattctcagaaacttgtttgtgatgtgtgtactcaactaaaagagttgaacctttctattgatagagcagttttgaaacactctttttgtggattctgcaagtggatatttggattgctttgaggatttcgttggaagcgggaattcatataaaaactagacagcagcattcccagaaatttctttcggatatttccattcaactcatagagatgaacatcgcctttcatagagcaggtttgaaacactctttttgtagtttgtggaagtggacatttcgatcgccttgacgcctacggtgaaaaaggaaatatcttcccataaaaaatagacagaagcattctcagaaacttgttggtgatatgtgtcctcaactaacagagttgaactttgccattgatagagagcagttttgaaacactctttttgtggaatctgcaagtggatatttggatagcttggaggatttcgttggaagcgggaattcaaataaaaggtagacagcagcattctcagaaatttctttctgatctctgcattcaactcatagagttgaagattccgtttcatagggcaggtttgaaatactctttctgtagtatctggatgtggacatttggagcgctttgatgcctacggtgaaaaagtaaatatcttcccataaaaacgagacagaaggattctcagaaacaagtttgtgatgtgtgtactcagctaacagagtggaacctctcttttgatgcagcagtttggaaacactctttttgtagaaagtgtaagtggatatttggatagctctaatgatttcgttggaaacgggaatatcatcatctaaaatctagacagaagcactctcagaaactactgtgtgatatctgcattcaagtcacagagttgaacattcgctttcttagagcacgtttgaaacactctttttgtagtgtctggaagtggacatttggagcgctttgattcctttggtgaaaaagggaatgtctacccataaaaactagacagaagcattctcaggaaacttgtttgtgatgtgtgtacccagccaaaggagttgaacatttctattgatagagcagttttgaaacgctctttttgtggaaaatgcaggtggatatttggatagcttggaggatttcgttggaagcgggaattcaaataaaaggtagacagcagcattctcagaaatttctttctgatgtctgcattcaactcatagagttgaagattccctttcatagagcaggtttgaaacactcgttctggagtatctggatgtggacatttggagcgctttgatgcctacggtggaaaagtaaatatcttcccataaaaacgagacagaaggattctcagaaacaagtttgtgatgtgtgtactcagctaacagagtggaacctttctttttacagagcagttttgaaactctatttttgtggattctgcaaattgatatttagattgctttaacgatatcgttgtaaaagggaatatcgtcatacaaaatctagacagaagcattctcacaaacttctttgtgatgtgtgtcctcaactaacagagttgaacctttcttttgatgcagcagtttggaaacactctttttgtagaaactgtaagtggatatttggatagctgtaacgatttcgttggaaacgggaatatcatcatctaaaatctagacagaagcactattagaaactacttggtgatatctgcattcaagtcacagagttgaacattcccttactttgagcacgtttgaaacactcttttggaagaatctggaagtggacatttggagcgctttgatgcctttggtgaaaagggaaacgtcttccaataaaagccagacaggaagcattctcagaaacttgttcgtgatgtgtgtactcaactaaaagagttgaacctttctattgatagcgcagttttgaaacactctttttgtggattctgcaagtggatatttggattgctttgaggatttcgttgcaagcgggaattcatataaaaactagacagcagcattcccagaaatttctttcggatatttccattcaactcatagagatgaacatggcctttcatagagcaggtttgaaacactctttttgttgtttgtggaagtggacatttcgatcgctttgacgcatacggtgaaaaaggaaatatcttcccataaaaattagacagaagcattctcagaaacttgttggtgatatgtgtcctcaactaacagagttgaactttgccattgatagagagcagttttgaaacactctttttgtggaatctgcaagtggatatttggatagcttggaggatttcgttggaagcgggaattcaaataaaaggtagacagcagcattctcagaaatttctttctgatgtctgcattcaactcatagagttgaagattccctttcatagagcaggtttgaaacactctttctggagtatctggatgtggacatttggagcgctttgatgcctacggtgaaaaagcaaatatcttcccataaaaacgagacagaaggattctgaaaaacaagtttgtgatgtgtgtactcagctaacagagtggaacctctcttttgatgcagcagtttggaaacactctttttgtagaaactgtaagtggatatttggatagctctaatgatttcgttggaaacgggaatatcatcatctaaaatctagacagaagcactctcagaaactactgtgtgatatctgcattcaagtcacagagttgaacattcgctttcttagagcacgtttgaaacactctttttgtagtgtctggaagtggacatttggagcgctttgattcctttggtgaaaaagggaatgtctacccataaaaactacacagaagcattctcagaaacttgtttgtgatgtgtgtacccagccaaaggagttgaacatttctattgatagagcagttttgaaacactctttttgtggaaaatgcaggtggatatttggatagcttggaggatttcgttggaagcgggaattcaaataaaaggttgacagcagcattctcagaaatttctttctgatgtctgcattcaactcatagagttgaagattccctttcatagagcaggtttgaaacactcgttctggagtatctggatgtggacatttggagcgctttgatgcctacggtggaaaagtaaatatcttcccataaaaacgagacagaaggattctcagaaacaagtttgtgatgtgtgtactcagctaacagagtggaacctttctttttacagagcagctttgaaactctattgttgtggattctgcaaattgatatttagattgctttaacgatatcgttggaaaagggaatatcgtcatacaaaatctagacagaagcattctcacaaacttctttgtgatgtgtgtcctcaactaacagagttgaacctttcttttgatgcagcagtttggaaacacccttttggtagaaactgtaagtggatatttggatagctctaacgaattcgttggaaacgggaatatcatcatctaaaatctagacagaagcactattagaaactacttggtgatatctgcattcaagtcacagagttgaacattcccttactttgagcacgtttgaaacactcttttggaagaatctggaagtggacatttggagcgttttgatgcctttggtgaaaaggaaacgtcttccaataaaagccagacagaagcattctcagaaacttgtttgtgatgtgtgtactcaactaaaagagttgaacctttctattgatagagcagttttgaaacactctttttgtggattctgcaagtggatatttggattgctttgaggatttcgttggaagcgggaattcgtataacaactacacagcagcattcccagaaatttctttcggatatttccattcaactcatagagatgaacatggcctttcatagagcaggtttgaaacactctttttgtagtttgtggaagtggacatttcgatcgccttgatgcctacggtgaaaaaggaaatatcttcccataaaaaatagacagaagcattctcagaaacttgttggtgatatgtgtcctcaactaacagagttgaactttgtcattgatagagagcagttttgaaacactctttttgtggaatctgcaagtggatatttggatagcttggaggatttcgttggaagcgggaattcaaataaaaggtagacagcagcattctcagaaatttctttctgatgtctgcattcaactcatagagttgaagattccctttcatagagcaggtttgaaacactctttctgtagtatctggatgtggacatttggagcgcattgatgcctacggtgaaaaagtataatcttcccataaaaacgagacagaaggattctgagaaacaagtttgtgatgtgtgtactcagctaacagagtggaacctctcttttgatgcagcagtttggaaacactctttttgtagaaactgtaagtggatatttggatagctctaatgatttcgttggaaacgggaatatcatcatctaaaatctagacagaagccctctcagaaactactttgtgatatctgcattcaagtcacagagtcgaacattcggtttcttagagcacgttggaaacactctttttgtagtgtctggaagtggacatttggagcgctttgatgcctttggtgaaaaagggaatgtcttcccataaaaactagacagaagcattctcagaaacttgtttgtgatgtgtgcacccagctaaaggagttgaacatttattgatagagcagttttgaagcactctttttgtggaaaatgcaagtggatatttggatagcttggaggatttcgttggaagcgggagttcaaataaaaggtagacagcagcattctcagaaatttctttctgattctgcattcaactcatagagttgaagattccctttcatagagcaggtttgaaacactcgttctggagtatctggatgtggacatttggagcgctttgatgcctacagtggaaaagtaaatatcttcccataaaaacgagacagaaggtttctcagaaacaagtttgtgatgtgtgtactcagctaacagagtggaacctttctttttacagagcaactttgaaactctatttttgtggattctgcaaattgatatttagattgctttaacgatatcgttggaaaagggaatatcgtcatacaaaatctagacagaagcattctcacaaacttctttgtgatgtgtgtcctcaactaacagagttgaacctttcttttgatgcagcaatttggaaacacccttttggtagaaactgtaactggatatttggatagctctaacgatttcgttggaaacgggaatatcatcacctaaaatctagacagaagcactattagaaactacttggtgatatctgcattcaagtcacagagtagaacattcccttacttcgaccacgtttgaaacactcttttggaagaatctggaagtggacatttggagcgctttgatgcctttggtgaaaaagggaatgtcttcccataaaaactagacagaagcattctcagaaacttgttcgtgatgtgtgtactcaactaaaagagttgaacctttctattgatagagcagttttgaaacactctttttgtggattctgcaagtggatatttgaattgctttgaggatttcgttggaagcgggaattcgtataagcactagacagcagcattcccagaaatttctttcggatatttccattcaactcatagagatgaacatggcctttcatagagcaggtttgaaacactctttttgtagtttgtggaagtggacatttcgatcgccttgacgcctacggtgaaaaaggaaatatcttcccataaacaatagacagaagcattctcagaaacttgttggtgatatgtgtcctcaactaacagagttgaactttgccattgatagagagcagttttgaaacactctttttgtggaatctgcaagtggatatttggatagcttggaggatttcgttggaagcgggaattcaaataaaaggtagacagcagcattctcagaaatttctttctgatgtctgcattcaactcatagagttgaagattccctttcatagagctggtttgaaacactctttctggagtatctggatgtggacatttggagcgctttgatgcctacggtgaaaaagtaaatatcttcccataaaaacgagacagaagcattctcacaaacttctttgtgatgtgtgtcctaaactaacagagttgaacctttcttttgatgcagcagtttggaaacactctttttgtagaaactgtaagtggatatttggatagctctaatgatttcgttggaaatgggaatatcatcatctaaaatctagacagaagccctctcagaaactactttgtgatatctgcattcaagtcacagagttgaacattcgctttcttagagcacgtttgaaacactctttttgtagtgtctggaagtggacatttggagcgctttgatgcctttggtgaaaaagggaatgtcttcccataaaaactagacagaagcattctcagaaacttgtttgtgatgtgtgtacccagccaaaggagttaaacatttctattgatagagcagttttgaaacactctttttgtggaaaatgcaggtggatatttggatagcttggaggatttcgttggaagcgggaattcaaataaaaggtagacagcagcattctcagaaatttctttctgatgtctgcattcaactcatagagttgaagattccctttcatagagcaggtttgaaacactcgttctggagtatctggatgtggacatttggagcgctttgatgcctacggtggaaaagtaaatatcttcccataaaaacgagacagaaggattctcagaaacaagtttgtgatgtgtgtactcagctaacagagtggaacctttctttttacagagcagctttgaaactctatttttgtggaatctgcaaattgatatttagattgctttaacgatatcgttggaaaagggaatatcgtcatacaaaatctagacagaagcattctcacaaacttctttgtgatgtgtgtcctcaactaacagagttgaacctttcttttgatgcagcagtttggaaacactctttttgtagaaactgtaagtggatatttggatagctctaacgatttcgttggaaacgggaatatcatcatctaaaatctagacagaagcactattagaaactacttagtgatatctgcattcaagtcacagagttgaacattcccttactttgagcacgtttcaaacactcttttggaagaatctggaagtggacatttggagcgctttgatgcctttggtgaaaaggaaacgtcttccaataaaagccagacagaagcattctcagaaacttgtttgtgatgtgtgtactcaactaaaagagttgaacctttctattgatagagcagttttgaaacactctttttgtggattctgcaagtggatatttggattgctttgaggatttcgttggaagcgggaattcgtataaaaactagacagcagcattcccagaaatttctttcggatatttccattcaactcatagagatgaacatggcctttcatagagcagttttgaatcactctttttgtagtttgtggaagtggacatttcgatcgccttgacgcatacggtgaaaaaggaaatatcttcccataaaaaatagacagaaacattctcagaaacttgttggtgatatgtgtcctcaactaacagagttgaactttgccattgatagagagcagttttgaaacactctttttgtggaatctgcaagtggatatttggatagcttggaggatttcgttggaagcgggaattcaaataaaaggtagacagcagcattctcagaaatttctttctgatgtctgcattcaactcatagagttgaagattccctttcatagagcaagtttgaaacactctttctggagtatctggatatggacatttggagcgctttgatgcctacggtgaaaaagtaaatatcttcccataaaaacgagacagaaggattctgagaaacaagtttgtgatgtgtgtactcagctaacagagtggaacctctcttttgatgcagcagtttggaaacactctttttgtagaaactgtaagtggatatttggatagctctaatgatttcgttggaaacgggaatatcatcaactaaaatctagacagaagccctctcagaaaccactttgtgatatctgcattcaagtcacagagttgaacattcgctttcttagagcacgtttgaaacactctttttgtagtgtctggaagtggacatttggagcgctttgatgcctttggtgaaaaagggaacgtcttcccataaaaactagacagaagcattctcagaaacttgtttgtgatgtgtgtacccagccaaaggagttgaacatttctattgatagagcagttttgaaacactcttgttgtggaaaatgcaggtggatatttggatagcttggaggatttcgttggaagcgggaattcaaataaaaggtagacagcagcattctcagaaatttctttctgatgtctgcattcaactcatagagttgaagattccctttcatagagcaggtttgaaacactctttctggagtatctggatgtggacatttggagcgctttgatgcctacggtgaaaaagtaaatatcttcccataaaaacgagacagaaggattctcagaaacaagtttgtgatgtgtgtactcagctaacagagtggaacctttctttttacagagcagctttgaaactctatttttgtggattctgcaaattgatatttagattgctttaaggatatcgttggaaaagggaatatcgtcatacaaaatctagacagaagcattctcacaaacttctttgtgatgtgtgtcctcaactaacagagttgaacctttcttttgatgcagcagtttggaaacactctttttgtagaaactgtaagtggatatttggatagctctaacgatttcgttggaaacgggaatatcatcatctaaaatctagacagaagcactattagaaactacttggtgatatctgcattcaagtcacagagttgaacattcccttacttcgaccacgtttgaaacactcttttggaagaatctggaagtggacacttggagcgctttgatgcctttggtgaaaaggaaacgtcttccaataaaagccagacagaagcattctcagaaacttgtttgtgatgtgtgtactcaactaaaagagttgaacctttctattgatagtgcagttttgaaacactctttttgtgaattctgcaagtggatatttggattgctttgaggatttcgttggaagcgggaattcgtataaacactagacagcagcattcccagaaatttctttcggatatttccattcgactcatagagatgaacatggcctttcatagagcaggtttgaaacactctttttgtagtttgtggaagtggacatttcgatcgccttgacgcctacggtgaaaaaggaaatatcttcccataaaaaatagacagaagcattctcagaaacttgttggtgatatgtgtcctcaactaacagagttgaactttgccattgatagagagcagttttgaaacactctttttgtggaatctgcaagtggatatttggatagcttggaggatttcgttggaagcgggaattcaaataaaaggtagacagcaggattctgagaaacaagtttgtgatgtgtgtactcagctaacagagtggaacctctcttttgatgcagtagtttggaaacactctttttgtagaaactggaagtggatatttggatagctctaatgatttcgttggaaacgggaatatcatcatctaaaatctagacagaagcactctcagaaactactgtgtgatatctgcattcaagtcacagagttgaacattcgctttcttagagcacgtttgaaacactctttttgtagtgtctggatgtggacatttggagcgctttgattcctttggtgaaaaagggaatgtctacccataaaaactagacagaagcattctcagaaacttgtttgtgatgtgtgtacccagccaaaggagttgaacatttctattgatagagcagttttgaaacactcttgttgtggaaaatgcaggtggatatttggatagcttggaggatttcgttggaagcgggaattcaaatgaaaggtagacagcaggattctgagagacaagtttgtgatgtgtgtactcagctaacagagtggaacctttctttttacagagcagctttgaaactctatttttgtggattctgcaaatggatatttagattgctttaacgatatcgttggaaaagggaatatcgtcatacaaaatctggacagaagcattctcacaaacttctttgtgacgtgtgtcctcaactaacagagttgaacctttcttttgatgcagcagtttggaaacactgtttttgtagcaactgtaagtggatatttggatagctctaacgatttcgttggaaacgggaatatcatcatctaaaatctagacagaagcactattagaaacttcttggtgatatctgcattcaagtcacagagtagaacattcccttacttcgagcacgtttgaaacactcttttggaagaatctggaagtggacatttggagcgctttgatgcctttggtgaaaaggaaacgtcttccaataaaagccagacagaagcattctcagaaacttgtttgtgatgtgtgtactcaactaaaagagttgaacctttctattgatagagcagttttgaaaccctctttttgtggattctgcaagtggatatttggattgctttgaggatttcgttggaagcgggaattcgtataaacactagacagcagcattcccagaaatttctttcggatctttccattcaactcatagagatgaacatggcctttcatattgaaacactctttttgtagtttgtggaagtggacatttcgatcgccttgacgcctacggtgaaaaaggaaatatcttcccataaaaaatagacagaagcattctcagaaacttgttggtgatatgtgtcctcaactaacagagttgaactttgccattgatagagagcagttttgaaacactctttttgtggaatctgcaagtggatatttggatagcttggaggatttcgttggaagcgggaattcaaataaaaggtagacagcagcattctcagaaatttctttctgatgtctgcattcaactcatagagttgaagattccctttcatagagcaggtttgaaacactctttctggagtatctggatgtggacatttggagcgctttgatgcctacggtgaaaaagtaaatatcttacccagaaaaacgagacagaaggattctgagaaacaagtttgtgatgtgtgtactcagctaacagagtggaacctctcttttgatgcagcagtttggaaacactctttttgtagaaactgtaagtggatatttggatagctctaatgatttcgttggaaaagggaatatcatcatctaaaatctagacagaagccctctcagaaactactttgtgatatctgcattcaagtcacagagttgaacattcgctttcttagggcacgttggaaacactctttttgtagtgtctggaagtggacatttggagtgctttgatgcctttggtgaaaaagggaatgtcttcccataaaaactagacagaagcattctcagaaacttgtttgtgatgtgtgtacccagctaaaggagttgaacatttctattgatagagcagttttgaaacactctttttgtggaaaatgcaagtggatatttggatagcttggaggatttcgttggaagcgggaattcaaataaaagtagacagcagcattctcagaaatttctttctgatgtctgcattcaactcatagagttgaagattccctttcatagagcaggtttgaaacactcgttctggagtatctggatgtggacatttggagcgctttgatgcctacggtggaaaagtaaatatcttcccataaaaacgagacagaaggattctgagaaacaagtttgtgatgtgtgtactcagctaacagagtggaacctttctttttacagagcagctttgaaactctatttttgtggattctgcaaatggatatttagattcctttaacgatatcgttggaaaagggaatatcgtcatacaaaatctagacagaagcattctcacaaacttctttgtgacgtgtgtcctcaactaacagagttgaacctttcttttgatgcagcagtttggaaacactgtttttgtagcaactgtaagtggatatttggatagctctaacgatttcgttggaaacgggaatatcatcatctaaaatctagacagaagcactattagaaactacttggtgatatctgcattcaagtcacagagtagaacattcccttacttcgagcacgtttgaaacactcttttggaagaatctggaagtggacatttggagcgctttgatgcctttggtgaaaaggaaacgtcttccaataaaagccagacagaagcattctcagaaacttgtttgtgatgtgtgtactcaactaaagagttgaacctttctattgatagagcagttttgaaaccctctttttgtggattctgcaagtggatatttggattgctttgaggatttcgttggaagcgggaattcgtataaacactagacagcagcattcccagaaatttctttcggatatttccattcgactcatagagatgaacatggcctttcatagagcaggtttgaaacactctttttgtagtttgtggaagtggacatttcgatcgccttgacgcctacggtgaaaaaggaaatatcttcccataaaaaatagacagaagcattctcagaaacttgttggtgatatgtgtcctcaactaacagagttgaactttgccattgatagagagcagttttgaaacactctttttgtggaatctgcaagtggatatttggatagcttggaggatttcattggaagcgggaattcaaataaaaggtagacagcagcattctcagaaatttctttctgatgtctgcattcaactcatagagttgaagattccctttcatagagcaggtttgaaacactctttctggagtatctggatgtggacatttggagcgctttgatgcctacggtgaaaaagtaaatatcttcccataaaaacgatacagaaggattctaagaaacaagtttgtgatgtgtgtactcagctaacagagtggaacctctcttttgatgcagcagtttggaaacactctttttgtagaaactgtatgtggatatttggatagctctaatgatttcgttggaaacgggaatatcatcatctaaaatctagacagaagccctctcagaaactactttgtgatatctgcattcaagtcacagggttgaacattcgctttcttagagcacgtttgaaacactctttttgtagtgtctggaagtggacatttggagcgctttgatgcctttggtgaaaaagggaatgtcttcccataaaaactagacagaagcattctcagaaacttgtttgtgatgtgtgtacccagccaaaggagttgaacatttctattgatagagcagttttgaaacactctttttgtggaaaatgcaagtggatatttggatagcttggaggatttcgttggaagcgggaattcaaataaaaggtagacagcagcattctcagaaatttctttctgatgtctgcattcaactcatagagttgaacattccctttcatagagcaggtttgaaacactcgttctggagtatctggatgtggacatttggagcgctttgatgcctacggtggaaaagtaaatatcttcccataaaaacgagacagaaggattctcagaaacaagtttgtgatgtgtgtactcagctaacagagtggaacctttctttttacagagcagctttgaaactctatttttgtggattctgcaaattgatatttagattgctttaacgatatcgttggaaaagggatatcgtcatacaaaatctagacagaagcattctcacaaacttctttgtgctgtgtgtcctcaactaacagagttgaacctttcttttgatgcagcaatttggaaacacccttttggtagaaactgtaactggatatttggatagctctaacgatttcgttggaaacgggaatatcatcatcaaaaggtagacagaagcactattagaaactacttggtgatatctgcattcaagtcacagagttgaacattcccttactttgagcaggtttgaaacactcttttggaagaatctggaagtggacatttggagcgctttgatgcctttggtgaaaaggaaacgtcttccaataaaagccagacagaagcattctcagaaacttgtttgtgatgtgtgtactcaactaaaagagttgaacctttctattgatagagcagttttgaaacactctttttgtggattctgcaagtggatatttggattgctttgaggatttcgttggaagcgggaattcgtataacaactagacagcagcattcccagaaatttctttcggatatttccattcaactcatagagatgaacatggcctttcatagagcaggtttgaaacactctttttgtagtttgtggaagtggacatttcgatcgccttgacacctacggtgaaaaaggaaatatcttcccataaaaaatagacagaagcattctcagaaacttgttggtgatatgtgtcctcaactaacagagttgaactttgccattgatagagagcagttttgaaacactctttttcctgaatctgcaagtggatatttggatagtttggaggatttcgttggaagcgggaattcaaataaaaggtagacagcaggattctgagaaacaagtttgtgatgtgtgtactcagctaacagagtggaagctctcttttgatgcagcagtttggaaacactctttttgtagaaactgtaagtggatatttggatagctctaatgatttcgttggaaacgggaatatcatcatctaaaatctagacagaagcactctcagaaactactttgtgatatctgcattcaagtcacagagttgaacattcgctttcttagagcactttttaaacactctttttgtagtatctggaagtggacatttggagctctttgatgcctttggtgaaataggaaatgtcttcccataaaaactagacagacaagcattctcagaaacttgtttgtgatgtgtgcacccagctaaaggagttgaacatttattgatagagcagttttgaagcactctttttgtggaaaatgcaagtggatatttggatagcttggaggatttcgttggaagcgggagttcaaataaaaggtagacagcagcattctcagaaatttctttctgatgtctgcattcaactcatagagttgaagattccctttcatagagcaggtttgaaacactctttctggagtatctggatgtggacatttggagcgctttgatgcctacggtgaaaaagtaaatatcttcccataaaaacgagacagaaggattctgagagacaagtttgtgatgtgtgtactcagctaacagagtggaacctttctttttacagagcagctttgaaactctatttttgtggattctgcaaatggatatttagattgctttaatgatatcgttggaaaagggaataacgtcatacaaaatctggacagaagcattctcacaaacttctttgtgatgtgtgtcctcaactagcagagttgaacctttcttttgatgcagcaatttggaaacacccttttggtagaaactgtaactggatatttggatagctctaacgatttcgttggaaacgggaatatcatcatctaaaatgtagacagaagcactattagaaactacttggtgatatctgcattcaagtcacagagttgaacattcccttactttgagcacgtttgaaacactcttttggaagaatctggaagtggacatttggagcgctttgatgcctttggtgaaaaggaaacgtcttccaataaaagccagacagaagcattctcagaaacttgtttgtgatgtgtgtactcaactaaaagagttgaacctttctattgatagagcagttttgaaacactctttttgtggattctgcaagtggatattaggattgttttgaggatttcgttggaagcgggaattcgtataaaatctagacagcagcattcccagaaatttctttcggatatttccattcgactcatagagatgaacatggcctttcatagagcaggtttgaaacactctttttgtagtttgtggaagtggacatttcgatcgccttgacgcctacggtgaaaaaggaaatatcttcccataaaaaatagacagaagaattctcagaaacttgtttgtgatgtgtatcctcaactgacagagttgaaccttgccattgatagagcagtttagaaacactctttttgtggaaaatgcaagtggatatttggatagcttggaggatttcgttggaagcgggaattcaaataaaaggtagacagcaggattctgagaaacaagtttgtgatgtgtgtactcagctaacagagtggaacctctgttttgatgcagcagtttggaaacactctttttgtagaaactgtaagtggatatttggatagctctaatgatttcgttggaaacgggaatatcatcatctaaaatctagacagaagccctctcagaaactactttgtgatatctgcattcaagtcacagagttgaacattcgctttcttagagcacgttggaaacactctttttgtagtgtctggaagtggacatttggagcgctttgatgcctttggtgaaaaagggaatgtcttcccataaaaactagacagaagcattctcagaaacttgtttgtgatgtgtgcacccagctaaaggagttgaacatttctattgatagagcagttttcaaacactctttttgtggaaaatgcaagtggatatttggatagcttggaggatttcgttggaagcgggagttcaaataaaaggtagacagcagcattctcagaaatttctttctgatgtctgcattcaactcatagcagttgaagattccctttcatagagcaggtttgaaacactctttctggagtatctggatgtggacatttggagcgctttgatgcctacggtgaaaaagtaaatatcttcccataaaaacgagacagaaggattctcagaaacaagtttgtgatgtgtgtactcagctaacagagtggaacctttctttttacagagcagctttgaaactctatttttgtggattctgcaaatggatatttagattgctttaatgatatcgctggaaaagggaatatggtcatacaaaatctagacagatgcattctcacaaacttctttgtgatgtgtgtcctcaactaacagagttgaacctttcttttgatgcagcaatttggaaacacccttttggtagaaactgtaactggatatttggatagctctaacgatttcgttggaaacgggaatatcatcatctaaaatctagacagaagcactattagaaactacttggtgatatctgcattcaagtcaaagagttgaacattcccttactttgagcacgtttgaaacactcttttggaagaatctggaagtggacatttggagcgctttgatgcctttggtgaaaaggaaacgccttccaataaaagccagacagaagcattctcagaaacttgtttgtgatgtgtgtactcaactaaaagagttgaacctttctattgatagagcagttttgaaacactctttttgtggattctgcaagtggatatttggattgctttgaggatttcgttggaagcgggaattcgtataaaaactagacagcagcattcccagaaatttctttcggatatttccattcacctcatagagatgaacatggcctttcatagagcaggtttgaaacactctttttgtagtttgtggaagtggacatttcgatcgccttgacgcctacggtgaaaaaggaaatatcttcccataaaaaatagacagaagcattctcagaaacttgttggtgatatgtgtcctcaactaacagagttgaactttgccattgatagagagcagttttgaaacactctttttgtggaatctgcaagtggatatttggatagcttggaggatttcgttggaagcgggaattcaaataaaaggtagacagcagcattctcagaaatttctttctgatgtctgcattcaactcatagagttgaagattccctttcatagagcaggtttgaagcactctttctggagtatctggatgtggacatttggagcgctttgatgcctacggtgaaaaagtaaatatcttcccataaaaacgagacagaaggattctgagaaacaagtttgtgatgtgtgtactcagctaacagagtggaacctctcttttgatgcagcagtttggaaacactctttttgtagaaactgtaagtggatatttggatagctctaatgatttcgttggaaacgggaatatcatcatctaaaatctagacagaagccctctcagaaactactttgtgatatctgcattcaagtcacagagttgaacattcgctttcttagagcacgtttgaaacaccctttttgtagtgtctggaagtggacatttggagcgctttgatgcctttggtgaaaaagggaatgtcttcccataaaaactagacagaagcattctcagaaacttgtttgtgatgtgtgtacccagccaaaggagttgaacatttctattgatagagcagttttgaaacactctttttgtggaaaatgcaggtggatatttggatagcttggaggatttcgttggaagctggaattcaaataaaaggtagacagcagcattctcagaaatttctttctgatgtctgcattcaactcatagagttgaagattccctttcatagagcaggtttgaaacactctttctggagtatctggatgtggacatttggagcgctttgatgcctacggtgagaaagtaaatatcttcccataaaaacgagacagaaggattctgagaaacaagtttgtgatgtgtgtactcagctaacagagtggaacctttctttttacagagcagctttgaaactctatttttgtggattctgcaaatggatatttagattgctttaatgatatcgctggaaaagggaatatggtcatacaaaatctagacagaagcattctcacaaacttctttgtgatgtgtgtcctcaactaacagagttgaacctttcttttgatgcagcagtttggaaacactgtttttgtagcaactgtaagtggatatttggatagctctaacgatttcgttggaaacgggaatatcatcatctaaaatctagacagaagcactattagaaactacttggtgatatctgcattcaagtcacagagttgaacattcccttactttgagcacgtttgaaacactcttttggaagaatctggaagtggacatttggagcactttgatgcctttggtgaaaaggaaacgtcttccaataaaagccagacagaagcattctcagaaacttgttcgtgatgtgtgtactcaactaaaagagttgaacctttctattgatagagcagttttgaaacactctttttgtggattctgcaagtggatatttggattgctttgaggatttcgttggaagcgggaattcgtataaacactagacagcagcattcccagaaatttctttcggatatttccattcaactcatagagatgaacatggcctttcatagagcaggtttgaaacactctttttgtagtttgtggaagtggacatttcgatcgccttgacgcctacggtgaaaaaggaaatatcttcccataaaaagtagacagaagcattctcagaaacttgttggtgatatgtgtcctcaactaacagagttgaactttgccattgatagagagcagttttgaaacactctttttgtggaatctgcaagtggatatttggatagcttggaggatttcgttggaagcgggaattcaaataaaaggtagacagcagcattctcagaaatttctttctgatgtctgcattcaactcgtagagttgaacattccctttcatagagcaggtttgaaacactctttctggagtatctggatgtggacatttggagcgctttgatgcctacggtgaaaaagtaaataacttcccataaaaacgagacagaaggattctgagaaacaagtttgtgatgtgtgtactcagctaacagagtggaacctctcttttgatgcagcagtttggaaacactctttttgtagaaactgtaagtggatatttggatagctctaatgatttcgttggaaacgggaatatcatcatctaaaatctagacagaagccctctcagaaactactttgtgatatctgcattcaagtcacagagttgaacattcgctttcttagagtacgttggaaacactctttttgtagtgtctggaagtggacatttggagcgctttgatgcctttggtgaaaaagggaacgtcttcccataaaaactagactgaagcattctcagaaacttgtttgtgatgtgtgtacccagccaaaggagttgaacatttctattgatagagcagttttgaagcgctctttttgtggaaaatgcaggtggatatttggatagcttggaggatttcgttggaagcgggagttcaaataaaaggtagacagcagcattctcagaaatttctttctgatgtctgcattcaactcatagagttgaatattccctttcatagagcaggtttgaaacactctttctggagtatctggatgtggacatttggagcgctttgatgcctacggtggaaaagtaaatatcttcccataaaaacgagacagaaggattctgagaaacaagtttgtgatgtgtgtactcagctaacagagtggaacctttctttttacacagcagctttgaaactctatttttgtggattctgcaaatggatatttagattgctttaatgatatcgctggaaaagggaatatggtcatacaaaatctagacagaagcattctcacaaacttctttgtgatgtgtgtcctcaactaacagagttgaacctttcttttgatgcagcagtttggaaacactctttttgtagaaactgtaagtggatatttggatagctctaacgatttcgttggaaacgggaatatcatcatctaaaatctagacagaagcactattagagactacttggtgatatctgcattcaagtcacagagttgaacattcccttactttgagcacgtttgaaacactcttttggaagaatctggaagtggacatttggagcgctatgatgcctttggtgaaaaggaaacgtcttccaataaaagccagacagaagcattctcagaaacttgtttgtgatgtgtgtactcaactaaaagagttgaacctttctattgatagagcagttttgaaacactctttttgtggattctgcaagtggatatttggattgctttgaggattttgttggaagcgggaattcgtataaaaactagacagcagcattcccagaaatttctttcggatatttccattcaactcatagagatgaacatggcctttcatagagaaggtttgaaacactctttttgtagtttgtggaagtggacatttcgatcgccttgacgcatacggtgaaaaaggaaatatcttcccataaaaaatagacagaagcattctcagaaacttgttggtgatatgtgtcctcaactaacagagttgaactttgccattgatagagagcagttttgaaacactctttttcctgaatctgcaagtggatatttgtatagcttggaggatttcgttggaagcgggaattcaaataaaaggtagacagcagcattctcagaaatttctttctgatgtctgcattcaactcatagagttgaacattccctttcataggacaggtttgaaatactctttctgtagtatctggatgtggacatgtggagcgctttgatgcctacagtgaaaaagtaaatatcttcccataaaaacgagacagaaggattctgagaaacaagtttgtgatgtgtgtactcagctaacagagtggaacctctcttttgatgcagcagtttggaaacactctttttgtagaaactgtaagtggatatttggatagctctaatgatttcgttggaaacgggaatatcatcatctaaaatctagacagaagccctctcagaaactactttgtgatatctgcattcaagtcacagagttgaacatttgctttcttagagcacgttggaaacactctttttgtagtgtctggaagtggacatttggagcgctttgatgcctttggtgaaaaagggaatgtcttcccataaaaactagacagaagcattctcagaaacttgtttgtgatgtgtgtacctagctaaaggagttgaacatttctattgatagagcagttttgaaacactctttttgtggaaaatgcaggtggatatttggataggttggaagatttcgttggaagcgggaattcaaataaatggtagacagcagcattctcagaaatttctttctgatgtctgcattcaactcatagagttgaagattccctttcatagagcaggtttgaaacattctttctggagtatctggatgtggacatttggagcgctttgatgcctacggtgaaaaagtaaatatcttcccataaaaacgagacagaaggattctcagaaacaagtttgtgatgtgtgtactcagctaacagagtggaacctttcttttcacagagcagctttgaaactctatttttgtggattctgcaaatggatatttagattgctttaacgatatcattggaaaagggaatatcgtcatacaaaatctggacagaagcattctcacaaacttctttgtgacgtgtgtcctcaactaacagagttgaacctttcttttgatgcagcagtttggaaacactgtttttgtagcaactgtaagtggatatttggatagctctaacgatttcgttggaaacgggaatatcatcatctaaaatctagacagaagcactattagaaactacttggtgatatctgcattcaagtcacagagttgaacattcccttactttgagcacgtttgaaacactcttctggaagaatctggaagtggacatttggagcgctttgatgcctttggtgaaaaggaaacgtcttccaataaaagccagacagaagcattctcagaaacttgttcgtgatgtgtgtactcaactaaaagagttgaacctttctattgatagagcagttttgaaacactctttttgtggattctgcaagtggatatttggattgctttgaggatttcgttggaagcgggaattcgtataaacactagacagcagcattcccagaaatttctttcggatatttccattcaactcatagagatgaacatggcctttcatagagcaggtttgaaacactctttttgtagtttgtggaagtggacatttcgatcgccttgacgcctacggtgaaaaaggaaatatcttcccttaaaaaatagacagaaacattctcagaaacttgttgatgatatgtgtcctcaactaacagagttgaactttgccattgatagagagcagttttgaaacactctttttgtggaatctgcaagtggatatttggatagcttggaggatttcgttggaagcgggaattcaaataaaaggtagacagcaggattcttgagaaacaagtttgtgatgtgtgtactcagctaacagagtggaacctctcttttgatgcagcagtttggaaacactctttttgtagaaactgtaagtggatatttggatagctctaatgatttcgttggaaacgggaatatcatcatctaaaatctagacagaagccctctcaaaaactactttgtgatatctgcattcaagtcacagagttgaacattcgctttcttagagcacgtttgaaacactctttttgtagtgtctggaagtggacatttggagcgctttgatgcctttggtgaaaaagggaatatcttcccataaaaactagacagaagcattctcagaaacttgtttgtgatgtgtgtacccagctaaaggagttgaacatttctattgatacagcagttttgaaacactctttttgtggaaaatgcaagtggatatttggatagcttggaggatttcgttggaagcgggaattcaaataaaaggtagacagcagcattctcagaaatttctttctgatgtctgcattcaactcatagagttgaagattccctttcatagagcaggtttgaaacactttctggagtatctggatgtggacatttggagcgctttgatgcctacggtgaaaaagtaaatatcttcccataaaaacgagacagaaggattctcagaaacaagtttgtgatgtgtgtactcagctaacagagtggaacctttctttttacagagcagctttgaaactctatttttgtggattctgcaaatggatatttagattgctttaacgatatcgctggaaaagggaatatggtcatacaaaatctagacagaagcattctcacaaacttctttgtgatgtgtgtcctcaactaacagagttgaacctttcttttgatgcagcagtttggaaacactctttttgtagaaactgtaagtggatatttggatagctctaacgatttcgttggaaacgggaatatcgtcatctaaaatctagacagaagcactattagaaactacttggtgatatctgcattcaagtcaaagagttgaacattcccttactttgagcacgtttgaaacactcttttggaagaatctggaagtggacatttggagcgctttgatgcctttggtgaaaaggaaacgtcttccaataaaagccagacagaagcattctcagaaacttgtttgtgatgtgtgtactcaactaaaagagttgaacctttctattgatagagcagttttgaaacactctttttgtggattctgcaagtggatatttggattgctttgaggatttcgttggaagcgtgaattcgtataaaaactagacagcagcattcccagaaatttctttcggatatttccattcaactcatagagatgaacatggcctttcatagagcaggtttgaaacactctttttgtagtttgtggaagtggacatttcgatcgccttgacgcctacggtgaaaaaggaaatatcttcccataaaaaatagacagaagcattctcagaaacttgttggtgatatgtgtcctcaactaacagagttgaactttgccattgatagagagcagttttgaaacactctttttgtggaatctgcaagtggatatttggatagcttggaggatttcgttggaagcgggaattcaaataaaaggtagacagcagcattctcagaaatttctttctgatgtctgcattcaactcatagagttgaacattccctttcgtagagcaggtttgaaacactctttctggagtatctggatgtggacatttggagcgctttgatgcctacggtgaaaaagtaaatatcttcccataaaaacgagacagaaggattctcagaaacaagtttgtgatgtgtgtactcagctaacagagtggaacctctcttttgacgcagcagtttggaaacactctttttgtagaaactgtaagtggatatttggatagctctaatgatttcgttggaaacgggaatatcatcatctaaaatctagacagaagcgctctcagaaactactttgcgatatctgcattcaagtcacagagttgaacattcgctttcttacagcacttttgaaacacactttttgtagtatctggaagtggacatttggagctctttgatgcctttggcgaaaaaggaaatgtcttcccataaaaactagacagaagcattctcagaaacttgtttgtgatgtgtgtacccagctaaaggagttgaacatttccattgatagagcagttttgaaacactctttttgtggaaaatgcaagtggatatttggatagcttggaggatttcgttggaagcgggaattcaaataaaaggtagacagcaggattctgagaaacaagtttgtgatgtgtgtactcagctaacagagtggaacctttctttttacagagcagctttgaaactctatttttgtggattctgcaaattgatatttagattgctttaacgatatcgttggaaaagggaatatcgtcatacaaaatcctagacagagagcattctcacaaacttctttgtgatgtgtgtcctcaactaacagagttgaacctttcttttgatgcagcagtttggaaacactgtttttgtagcaactgtaagtggatatttggatagctctaacgatttcgttggaaacgggaatatcatcatctaaaatctagacagagcactattagaaactacttggtgatatcagcattcaagtcacagagttgaacactcccttacttcgaccacgtttgaaacactcttttggaagaatctggaagtggacatttggagcgctttgatgcctttggtgaaaaggaaacgtcttccaataaaagccagacagaagcattctcagaaacttgttcgtgatgtgtgtactcaactaaaagagttgaacctttctattgatagcacagttttgaaacactctttttgtggattctgcaagtggatatttggattgctttgaggatttcgttggaagcgggaattcatataaaaactagacagcagcattcccagaaatttctttcggatatttccattcaactcatagagatgaacatggcctttcatagagcaggtttgaaacactctttttgtagtttgtggaagtggacatttcgatcgccttgacgcctacggtgaaaaaggaaatatcttcccataaaaaatagacaaaagcattctcagaaacttgtttgtgatgtgtgtacctagctaaaggagttgaacatttctattgatagagcagtgttgaaacactctttttgtggaaaatgcaagtggatatttggatagcttggaggatttcgttggaagcgggaattcaaataaaaggtagacagcaggattctcagaaacaagtttgtgatgtgtgtactcagctaacagagtggaacctctgttttgatgcagcagtttggaaacactctttttgtagaaactgtaagtggatatttggatagctatcatgatttcgttggaaacgggaatatcatcatctaaaatctagacagaagccctctcagaaactactttgtgatatctgcattcaactcacagagttgaacattcggtttcttagagcacgtttgaaacactcttttcgtagtgtctggaagtggacatttggagcgctttgatgcctttggtgaaaaagggaatgtcttcccataaaaactagacagaagcgttctcagaaacttgtttgtgatgtgtgtacccagctaaaggagttgaacgtttctattgatagagcagttttgaaacactctttttgtggaaaatgcaagtggatgtttggatagctaggaggatttcgttggaagcgggaattcaaataaaaggtagacagcagcattctcagaaatttctttctgatgtctgcattcaactcatagagttgaagattccctttcatagagcaggtttgaaacactctttctggagtatctggatgtggacatttggagcgctttgatgcctacggtggaaaagtaaatattttcccataaaaacgagacagaaggattctcagaaacaagtttgtgatgtgtgtactcagctaacagagtggaacctttatttttacagagcagctttgaaactctatttttgtggattctgcaaattgatatttagattgctttaacgatatcgttggaaaagggaatatcgtcatacaaaatactagacagaagcattctcacaaacttctttgtgatgtgtgtcctcaactaacagagttgaacctttcttttgatgcagcaatttggaaacacccttttggtagaaactgtaagtggatatttggatagctctaacgatttcgttggaaacgggaatatcatcatctaaaatctagacagaagcactattagaaactacttggtgatatctgcattcaagtcacagagtagaacattcccttacttcgagcacgtttgaaacactcttttggaagaatctggaagtggacatttggagcgctttgatgcctttggtgaaaaggaaacgtcttccaataaaagccagacagaagccttctcagaaacttgttcgtgatgtgtgtactcaactaaaagagttgaacctttctattgatagagcagttttgaaacactctttttgtggattctgcaagtggatatttcgattgctttgaggatttcgttggaagcgggaattcgtataaacactagacagcagcattcccagaaatttctttcggatatttccattcaactcatagagatgaacatggcctttcatagagcaggtttgaaacactctttttgtagtttgtggaagtggacatttcgatcgccttgacgcctacgctgaaaaaggaaatatcttcccataaaaaatagacagaagcattctcagaaacttgttggtgatatgtgtcctcaactaacagagttgaactttgccattgatagagagcagttttgaaacactctttttgtggaatctgcaagtggatatttggatagcttggaggatttcgttggaagcgggaattcaaataaaaggtagacagcagcattctcagaaatttctttctgatgtctgcattcaactcatagagttgaacattccctttcatagagcaggtttgaaacactctttctggagtatctggatgtggacatttggagcgctttgatgcctacggtgaaaaagtataatcttcccataaaaacgagacagaagcattctcacaaacttctttgtgatgtgtgtcctcaactaacagagttgaacctttcttttgaagcagcagtttggaaacactctttttgtagaaactgtaagtggatgtttggatagctctaatgatttcgttggaaacgggaatatcatcatctaaaatctagacagaagccctctcagaaactactttgtgatatctgcattcaagtcacagagttgaacattcgctttcttagagcacgttggaaacactctttttgtagtgtctggaagtggacatttggagcgctttgatgcctttggtgaaaaagggaatgtcttcccataaaaactagacagaagcattctcagaaacttgtttgtgatgtgtgtacccagctaaaggagttgaacatttctattgatagagcagttttgaaacactctttttgtggaaaatgcaggtggatatttggatagcttggaggatttcgttggaagcgggaattcaaataaaaggtagacagcagcattctcagaaatttctttctgatgtctgcattcaactcatagagttgaagattccctttcatagagcaggtttgaaacactcgttctggagtatctggatgtggacatttggagcgctttgatgcctacggtggaaaagtaaatatcttcccataaaaacgagacagaaggattctgagaaacaagtttgtgatgtgtgtactcagctaacagagtggaacctttctttttacagagcagctttgaaactctatttttgtggattctgcaaattgatatttagattgctttaacgatatcgttggaaaagggaatatcgtcatacaaaatctagacagaagcattctcacaaacttctttgtgacgtgtgtcctcaactaacagagttgaacctttcttttgatgcagcagtttggaaacactgtttttgtagcaactgtaagtggatatttggatagctctaacgatttcgttggaaacgggaatatcatcatctaaaatctagacagaagcaagtattagaaactacttggtgatatctgcattcaagtcacagagttgaacattcccttactttgagcacgtttcaaacactcttttggaagaatctggaagtggacatttggagcgctttgatgatgcctttggtgaaaaggaaacgtcttctaataaaagccagacagaagcattctcagtaaacttgtttgtgatgtgtgtactcaactaaaagagttgaacctttctattgatagagcagttttgaaacactctttttgtggattctgcaagtggatatttggattgctttgaggatttcgttggaagcgggaattcatataaaaactagacagcagcattcccagaaatttctttcggatatttccattcaactcatagagatgaacatcgcctttcatagagcaggtttgaaacactctttttgtagtttgtggaagtggacatttcgatcgccgtgacgcctacagtgaaaaaggaaatatcttcccataaacaatagacagaagcattctcagaaacttgttggtgatatgtgtcctcaactaacagagttgaactttgccattgatagagagcagttttgaaacactctttttgtggaatctgcaagtggatatttggatagcttggaggatttcgttggaagcaggaattcaaataaaaggtagacagcagcattctcagaaatttctttctgatgtctgcattcaactcatagagttgaagattccctttcatagagcaggtttgaaacactctttctggagtatctggatgtggacatttggagcgcttggatgcctacggtgaaaaagtaaatatcttcccataaaaacgagacagaaggattctgagaaacaagtttgtgatgtgtgtactcagctaacagagtggaacctctcttttgatgcagcagtttggaaacactctttttgtagaaactgtaagtggatatttggatagctctaatgatttcgttggaaacgggaatatcatcatctaaaatctagacagaagccttctgagaaactactttgtgatatctgcattcaagtcacagagttgaacattcgctttcttagagcacgttggaaacactctttttgtagtgtctggaagtggacatttggagcgctttgatgcctttggtgaaaaagggaatgtcttcccataaaaactagacagaagcattctcagaaacttgtttgtgatgtgtgtacccagccaaaggagttgaacatttctattgatagagcagttttgaaacactctttttgtggaaaatgcaagtggatatttggatagcttggaggatttcgttggaagcgggaattcaaataaaaggtagacagcagcattctcagaaatttctttctgatgtctgcattcaactcataaagttgaagattccctttcatagagcaggtttgaaacactctttctggagtatctggatgtggacatttggagcgctttgatgcctacggtgaaaaagtaaatatcttcccataaaaacgagacagacaaggattctgagagacaagtttgtgatgtgtgtactcagctaacagagtggaacctttctttttacagagcagctttgaaactctatttttgtggattctgcaaatggatatttagattgctttaacgatatcgttggaaaagggaatatcgtcatacaaaatctggacagaagcattctcacaaacttctttgtgatgtgtgtcctcaactaacagagttgaacctttcttttgatgcagcagtttggaaacactctttttgtagaaactgtaagtggatatttggatagctctaacgatttcgttggaaacgggaatatcatcatctaaaatctagacagaagcactattagaaactacttggtgatatctgcgttcaagtcacagagttgaacattcccttactttgagcacgtttgaaacactcttttggaagaatctggaagtggacatttggagcgctttgatgcctttggtgaaaaggaaacgtcttccaataaaagccagacagaagcattctcagaaacttgttcatgatgtgtgtactcaactaaaagatttgaacctttctattgatagagcagttttgaaacactctttttgtggattctgcaagtggatatttggattgctttgaggatttcgttggaagcggtaattcgtataaaaactagacagcagcattcccagaaatttctttcggatatttccattcaactcatagagatgaacatggcctttcatagagcaggtttgaaacactctttttgtagtttgtggaagtggacatttcgatcgccttgacgcctacggtgaaaaaggaaatatcttcccataaaaaatagacagaagcattctcagaaacttgttggtgatatgtgtcctcaactaacagagttgaactttgccattgatagagagcagttttgaaacactctttttgtggaatctgcaagtgtatatttggatagcatggaggatttcgttggaagcgggaattcaaataaaaggtagacagcaacattctcagaaatttctttctgatgtctgcattcaactcatagagttgaagattccctttcatagagcaggtttgaaacactctttctggagtatctggatgtggacatttggagcgctttgatgcctacggtgaaaaagtaaatatcttcccataaaaacgagacagaaggattctgagaaacaagtttgtgatgtgtgtactcagctaacagagtggaacctctgttttgatgcagcagtttggaaacactctttttgtagaaactgtaagtggatatttgaatagctctaatgatttcgttggaaacgggaatatcatcatctaaaatctagacagaaagccctctcagcaaactactttgtgatatctgcattcaagtcacagagttgaacattcgctttcttagagcacgtttgaaacactctttttgtagtgtctggaagtggacatttggagcgctttgatgcctttggtgaaaaagggaacgtcttcccataaaaactagacagaagcattctcagaaacttgtttgtgatgtgtgtacccagctaaaggagttgaacatttctattgatagagcagttttgaaacactctttttgtggaaaatgcaagtggatatttggatagcttggaggatttcgttggaagcgggaattcaaataaaaggtagacagcagcattctcagaaatttctttctgatgtctgcattcaactcatagagttgaagattccctttcatagagcaggtttgaaacactcgttctggagcatctggatgtggacatttggagcgctttgatgcctacggtggaaaagtaaatatcttcccataaaaacgagacagaaggattctcagaatcaagtttgtgatgtgtgtactcagctaacagagtggaacctttctttttacagagcagctttgaaactctatttttgtggattctgcaaattgatatttagattgctttaacgatatcgttggaaaagggaatatcgtcatacaaaatctagacagaagcattctcacaaacttctttgtggtgtgtgtcctcaactaacagagttgaacctttcttttgatgcagcaatttggaaacaccctttttgtagaaactgtaactggatatttgcttagctctaacgatttcgttggaaacgggaatatcatcatctaaaatctagacagaagcactattagaaactacttggtgatatctgcattcaagtcacagagttgaacattcccttactttgagcacgtttgaaacactcttttggaagaatctggaagtggacatttgtagcgctttgatgatgcctttggtgaaaagaaaacgtcttccaataaaagccagacagaagcattctcagaaacttgttcgtgatgtgtgtactcaactaaaagagatgaacctttctattgatagagcagttttgaaacactctttttgtggattctgcaagtggatatttggattgctttgaggatttcgttggaagcgggaattcgtataaacactagacagcagcattcccagaaatttctttcggatatttccattcaactcatagagatgaacatggcctttcatagagcaggtttgaaacactctttttgtagtttgtggaagtggacatttcgatcgccttgacgcctacggtgaaaaaggaaatatcttcccataaaaaatagacagaagcattctcagaaacttgttggtgatatgtgtcctcaactaacagagttgaactttgccattgatagagagcagttttgaaacactctttttgtggaatctgcaagtggatatttggatagcttggaggatttcgttggaagcgggaattcaaataaaaggtagacagcagcattctcagaaatttctttctgatgtctgcattcaactcatagagttgaacattccctttcatagagcaggtttgaaacactctttctggagtatctggatgtggacatttggagcgctttgatgcctacgatgaaaaagtaaatatcttcccataaaaacgagacagaaggattctgagaaacaagtttgtgatgtgtgtactcagctaacagagtggaacctctcttttgatgcagcagtttggaaacactctttttgtagaaactgtaagtggatatttggatagctctaatgatttcgttggaaacgggaatatcatcatctaaaatctagacagaagccctctcagaaactactttgtgatatctgcattcaagtcacagcagttgaacattcgctttcttagagcacgttggaaacactctttttgtagtgtctggaagtggacatttggagcgctttgatgcctttggtgaaaaagggaatgtcttcccataaaaactagacagaagcattctcagaaacttgtttgtgatgtgtgtacccagccaaaggagttgaacatttctattgatagagcagttttgaaacactctttttgtggaaaatgcaggtggatatttggatagcttggaggatttcgttggaagcgggaattcaaataaaagttagacagcagcattctcagaaatttctttcttatgtctgcattcaactcatagagttgaagattccctttcatagagcaggtttgaaacactcgttctggagtatctggatgtggacatttggagcgctttgatgtctacggtggaaaagtaaatatcttcccataaaaacgagacagacaaggattctcagaaacaagtttgtgatgtgtgtactcagctaacagagtggaacctttctttttacagagcagctttgaaactctatttttgtggattctgcaaattgatatttagattgctttaacgatatcgttggaaaagggaatatcgtcatacaaaatctagacagaagcattctcacaaacttctttgtggtgtgtgtcctcaactaaccgagttgaacctttcttttgatgcagcaatttggaaacaccctttttgtagaaactgtaactggatatttgcttagctctaacgatttcgttggaaacgggaatatcatcatctaaaatctagacagataagcactattagaaactacttggtgatatctgcattcaagtcacagagtagaacattcccttacttcgagcacgtttgaaacactcctttggaagaatctggaagtggacatttggagcgctttgatgcctttggtgaaaaggaaacgtcttccaataaaagccagacagaagcattctcagaaacttgttggtgatgtgtgtactcaactaaaagagttgaacctttctattgatagagcagttttgaaacactctttttgtggattctgcaagtggatatttggattgctttgaggatttcgttggaagcgggaattcatataaaaactagacagcagcattcccagaaatttctttcggatatttccattcaactcatagagatgaacatggcctttcatagagcaggtttgaaacactctttttgtagtttgtggaagtggacatttcgatcgccttgacgcctacgctgaaaaaggaattatcttcccataaaaaatagacagaagcattctcagaaacttgttggtgatatgtgtcctcaactaacagagttgaactttgccattgatagagagcagttttgaaacactcttgttgtggaaaatgcaggtggatatttggatagcttggaggatttcgttggaagcgggaattcaaataaaaggtagacagcagcattctcagaaatttctttctgatgtctgcattcaactcatagagttgaacattccctttcatagagcaggtttgaaacactctttctggagtatctggatgtggacatttggagcgctttgatgcctacggtgaaaaagtaaatatcttcccataaaaacgagacagaaggattctgagaaactagtttgtgatgtgtgtactcagctaacagagtggaacctctgttttgatgcagcagtttggaaacactctttttgtagaaactgtaagtggatatttggatagctctaatgatttcgttggaaacgggaatatcatcatctaaaatctagacagaagccctctcagaaactactttgtgatatctgcatgcaagtcacagagttgaacattcgctttcttagagcacgttggaaacactctttttgtagtgtctggaagtggacatttggagcgctttgatgcctttggtgaaaaagggaatggtcttcccataaaaactagacagaagcattctcagaaacttgtttgtgatgtgtgtacccagctaaaggagttgaacatttctattgatagagcagttttgaaacactctttttgtggaaaatgcaagtggatatttggatagcttggaggatttcgttggaagcgggaattcaaataaaaggtagacaggagcattctcagaaatttctttgtgatgtctgcattcaactcatagagttgaagattccctttcatagagcaggtttgaaacactctttctggagtatctggatgtggacatttggagcgctttgatgcctacggtggaaaagtaaatatcttcccataaaaacgagacagaaggattctgagagacaagtatgtgatgtgtgtactcagctaacagagtggaacctttctttttacagagcagctttgaaactctatttttgtggattctgcaaatggatatttagattgctttaatgatatcgttggaaaagggaatatcgtcatacaaaatctggacagaagcattctcacaaacttctttgtgatgtgtgtcctcaactaacagagttgaacctttcttttgatgcagcagtttggaaacactctttttgtagaaactgtaagtggataattggatagctgtaacgatttcgttggaaacgggaatatcgtcatctaaaatttagacagaagcactattagaaactacttggtgatatctgcattcaagtcacagagttgaacattcccttactttgagcacgtttgaaacactcttttggaagaatctggaagtggacatttggagcgctttgatgcctttggtgaaaaggaaacgtcttccaataaaagccagacagaagcattctcagaaacttgtttgtgatgtgtgtactcaactaaaagagttgaacctttctattgatagagcagttttgaaacactctttttgtggattctgcaagtggatatttggattgctttgaggatttcgttggaagcgggaattcgtataaaaactagacagcagcattcccagaaatttctttcggatatttccattcgactcatagagatgaacatggcctttcatagagcaggtttgaaacactctttttgtagtttgtggaagtggacatttcgatcgccttgacgcctacggtgaaaaaggaaatatcttcccataaaaaatagacagaagcattctcagaaacttgttggtgatatgtgtcctcaactaacagagttgaactttgccattgatagagagcagttttgaaacactctttttgtggaatctgcaagtggatatttggatagcttggaggatttcgttggaagcgggaattcaaataaaaggtagacagcagcattctcagaaatttctttctgatgtctgcattcaactcatagagttgaagattccgtttcatagagcaggtttgaaacactctttctggagtatctggatgtggacatttggagcgctttgatgcctacggtgaaaaagtaaatatcttcccataaaaacgagacagaaggattctgagaaacaagtttgtgctgtgtgtactcagctaacagagtggaacctctcttttgatgcagcagtttggaaacactctttttgtagaaactgtaagtggatatttggatagctctaatgatttcgttggaaacgggaatatcatcatctaaaatctagacagaagccctctcagaaaactactctgtgatatctgcattcaagtcacagagttgaacattcgttttcttagagcacgtttgaaacactctttttgtagtgtctggaagtggacatttggagcgctttgatgcctttggtgaaaaagggaatgtcttcccataaaaactagacagaagcatgctcagaaacttgtttgtgatgtgtgtacccagccaaaggagttgaacatttctattgatagagcagttttgaaacactctttttgtggaaaatgcaggtggatatttggatagcttggaggatttcgttggaagcgggaattcaaataaaaggtagacagcaggattctgagaaacaagtttgtgatgtgtgtactcagctaacagagtggaacctttctttttacagagcagctttgaaactctatttttgtggattctgcaaattgatatttagattgctttaacgatatcgttggaaaagggaatatcgtcatacaaaatctagacagaagcattctcacaaacttctttgtgatgtgtgtcctcaactaacagagttgaacctttcttttgatgcagcaatttggaaacacccttttggtagaaactaactggatatttggatagctctaacgatttcgttggaaacgggaatatcatcatcaaaatgtagacagaagcactattagaaactacttggtgatatctgcattcaagtcacagcagttgaacattcccttactttgagcacgtttcaaacactcttttggaagaatctggaagtggacatttggagcgctttgatgcctttggtgaaaaggaaacgtcttccaataaaagccagacagaagcattctcagaaacttgtttgtgatgtgtgtactcaactaaaagagttgaacctttctattgatagagcagttttgaaacactctttttgtggattctgcaagtggatatttggattgctttgaggatttcgttggaagcgggaattcgtataaaaactagacagcagcattcccagaaatttctttcggatatttccattcgactcatagagatgaacatggcctttcatagagcaggtttgaaacactctttttgtagtttgtggaagtggacatttcgattgccttgacgcctacggtgaaaaaggatatatcttcccataaaaaatagacagaagcattctcagaaacttgttggtgatatgtgtcctcaactaacagagttgaactttgccattgatagagagcagttttgaaacactatttttgtggaatctgcaagtggatatttggatagcttggaggatttcgttggaagcgggaattcaaataaaaggtagacagcaggactctgagaaacaagtttgtgatgtgtgtactcagctaacagagtggaacctctcttttgatgcagcagtttggaaacactctttttgtagaaactgtaagtggatatttggatagctctaatgatttcgttggaaacgggaatatcatcatctaaaatctagacagaagcactctcagaaaccactttgtgatatctgcattcaagtcacagagttgaacattcgctttcttagagcacgtttgaaacactctttttgtagtgtctggaagtggacatttggagcgctttgatgcctttggtgaaaaagggaacgtcttcccataaaaactagacagaagcattctcagaaacttgtttgtgatgtgtgtacccagccaaaggagttgaacatttctattgatagagcagttttgaaacactcttgttgtggaaaatgcaggtggatatttggatagcttggaggatttcgttggaagcgggaattcaaataaaaggtagacagcagcattctcagaaatttctttctgatgtctgcattcaactcatagagttgaacattccctttcatagagcaggtttgaaacactctttctggagtatctggatgtggacatttggagcgctttgatgcctacggtggaaaagtaaatatcttcccataaaaacgagacagaaggattctcagaaacaagtttgtaatgtgtgtactcagctaacagagtggaacctttctttttacagagcagctttgaaactctattgttgtggattctgcaaattgatatttagattgctttaacgatatcgttggaaaagggaataccgtcatacaaaatctagacagaagcattctcacaaacttctttgtgatgtgtgtcctcaactaacagagttgaacctttcttttgatgcagcaatttggaaacacccttttggtagaaactgtaactggatatttggatagctctaacgatttcgttggaaacgggaatatcatcatctaaaatctagacagaagcactattagaaactacttggtgatatctgcattcaagtcacagagttgaacattcccttactttgagcacgtttgaaacactcttttggaagaatctggaagtggacatttggagcgctttgatgcctttggtgaaaaggaaacgtcttccaataaaagcccgacagaagcattctcagaaacttgtttgtgatgtgtgtactcaactaaaagagttgaacctttctattgatagagcagttttgaaacactctttttgtggattctgcaagtggatatttggattgctttgaggatttcgttggaagcgggaattcgtataaaaactagacagcagcattaccagaaatttctttcggatatttccattcaactcatagagaagaacatgacctttcatagagcaggtttgaaacactctttttgtagtttgtggaagtggacatttcgatcaccttgacgcctacggtgaaaaaggaaatatcttcccataaaaaatagacagaagcattctcagaaacttgttggtgatatgtgtcctcaactaacagagttgaactttgccattgatagagagcagttttgaaacactctttttgtggaatctgcaagtggatatttggatagcttggaggatttcgttggaagtgggaattcaaataaaaggtagacagcagcattctcagaaatttctttctgatgtctgcattcaactcatagagttgaagattccctttcatagagcaggtttgaaacactctttctggagtatctggatgtggacatttggagcgctttgaggcctatggtgagaaagtaaatatcttcccataaaaacgagacagaaggattctgagaaactagtttgtgatgtgtgtactcagctaacagagtggaacctctcttttgatgcagcagtttggaaacactctttttgtagaaactgtaagtggatatttggatagctctaatgatttcgttggaaacgggaatatcatcatctaaaatctagacagaagccctctcagaaactactttgtgatatctgcattcaagtcacagagttgaacattcgctttcttagagcacgtttgaaacactctttttgtagtgtctggaagtggacatttggagcgctttgatgcctttggtgaaaaagggaatgtcttcccataaaaactagacagaagcattctcagaaacttgtttgtgatgtgtgtacccagctaaaggagttgaacatttctattgatagagcagttttgaaacactctttttgtggaaaatgcaagtggatatttggatagcttggaggatttcgttggaagcgtgaattcaaataaaaggtagacagcagcattctcagaaatttctttctgatgtctgcattcaactcatagagttgaacattccctttcatagagcaggtttgaaatactctttctgtagtatctggatgtggacatttggagcgctttgatgcctacggtgaaaaagtaaatatcttcccataaaaacgagacagaaggattctgagaaacaagtttgtgatgtgtgtactcagctaacagagtggaacctttcttttcacagagcagctttgaaactctatttttgtggattctgcaaatggatatttagattgctttaacgatatcgttggaaaagggaatatcgtcatacaaaatctagacagaagcattctcacaaacttttttgtgatgtgtgtcctcaactaacagagttgaatctttcttttgatgcagcagtttggaaacacccttttggtagaaactgtaagtggatatttggatagctctaacgatttcgttggaaacgggaatatcatcatctaaaatctagacagaagcactattagaaactacttggtgatatctgcattcaagtcacagagttgaacattcccttactttgagcacgtttgaaacactcttttggaagaatctggaagtggacatttggagcgctttgatgcctttggtgaaaaggaaacgtcttccaataaaagccagacagaagcattctcagaaacttgttcgtgatgtgtgtactcaactaaaagagttgaacctttctattgatagagcagtttagaaacactctttttgtggattctgcaagtggatatttggattgctttgaggatttcgttggaagcgggaattcgtataaacactagacagcagcattcccagaaatttctttcggatatttccattcaactcatagagatgaacatggcctttcatagagcaggtttgaaacactctttttgtattttgtggaagtggacatttcgatcgccttgacgcctacggtgaaaaaggaaatatcttcccataaaaaatagacagaagcattctcagaaacttgttggtgatatgtgtcctgaactaacagagttgaactttgccattgatagagagcagttttgaaacactctttttgtggaatctgcaagtggatatttggatagtttggaggatttcgttggaagcgggaattcaaataaaaggtagacagcagcattctcagaaatttctttctgatgtctgcattcaactcatagagttgaagattccctttcatagagcaggtttgaaacactctttctggagtatctggatgtggacatttggagcgctttgatgcctacggtgagaaagtaaatatcttcccataaaaacgagacagaaggattctgagaaactagtttgtgatgtgtgtactcagctaacagagtggaacctctcttttgatgcagcagtttggaaacactctttttgtagaaactgtaagtggatatttgtatagctctaatgatttcgttggaaacgggaatatcatcatctaaaatctagacagaagcactctcagaaactactttgtgatatctgcattcaagtcacagagttgaacattcgctttcttagagcacgtttgaaacactctttttgtagtgtctggaagtggacatttggagcgctttgatggctttggtgaaaaagggaacgtcttcccataaaaactagacagaagcattctcagaaacttgtttgtgatgtgtgtacccagccaaaggagttgaacatttctattgatagagcagttttgaaacactctttttgtggaaaatgcaggtggatatttggatagcttggaggatttcgttggaagcgggaattctaataaaaggtagacagcagcattctcagaaatttctttctgatgtctgcattcaactcatagagttgaagattccctttcatagagcaggtttgaaacactctttctggagtatctggatgtggacatttggagcgctttgatgcctacagtgaaaaagtaaatatcttcccataaaaacgagacagaaggattctcagaaacaagtttgtgatgtgtgtactcagctaacagagtggaacctttctttttacagagcagctttgaaactctatttttgtggattctgcaaatggatatttagattgctttaacgatatcgttggaaaagggaatatcgtcatacaaaatctagacagaagcattctcacaaacttctttgtgatgtgtgtcctcaactaacagagttgaacttttcttttgatgcagcaatttggaaacacccttttggtagaaactgtaactggatatttggatagctctagcgatttcgttggaaacgggaatatcatcatctaaaatgtagacagaagcactattagaaactacttggtgatatctgcattcaagtcacagagttgaaattcccttactttgagcacgtttgaatcactcttttggaagaatctggaagtggacatttggagcgctttgatgcctttggtgaaaaggaaacgtcttccaataaaagccagacagaagcattctcagaaacttgtttgtgatgtgtgaactcaactaaaagagttgaacctttctattgatagagcagttttgaaacactctttttgtggattctgcaagtggatatttggattgctttgaggatttcgttggaagcgggaattcgtataaaaactagacagcagcattcccagaaatttctttcggatatttccattcaactcatagagatgaacatggcctttcatagagcaggtttgaagcactccttttgtagtttgtggaagtggacatttcgatcgccttgacgcctacggtgaaaaaggaaatatcttcccataaaaaatagacagaagcattctcagacaaacctttgttggtgatatgtgtcctcaactaacagagttgaactttgccattgatagagagcagttttgaaacactctttttgtggaatctgcaagtggatatttggatagcttggaggatttcgttggaagcgggaattcaaataaaaggtagacagcagcattctcagaaatttctttctgatgtctgcattcaactcatagagttgaagattccctttcatagagcaggtttgaaacactcgttctggagtatctggatgtggacatttggagcgctttgatgcctacggtggaaaagtaaatatcttcccataaaaaacgagacagaaggattctgagaaacaagtttgtgatgtgtgtactcagctaacagagtggaacctctcttttgatgcagcagtttggaaactctctttttgtagaaactgtaagtggatatttggatagctctaatgatttcgttggaaacgggaatatcatcatctaaaatctagacagaagccctctcagaaactactttgtgatatctgcattcaactcacagagttgaacattcgctttcttagagcacgtttgaaacactctttttgtagtgtctggaagtggacatttggagcgctttgatgcctttggtgaaaaagggaatgtcttcccataaaaactagacagaagcattctcagaaacttgtttgtgatgtgtgtacccagctaaaggagttgaacatttctattgatagagcagttttgaaacactctttttgtggaaaatgcaagtggatatttggatagcttggaggatttcgttggaagcgggaattcaaataaaaggtagacagcagcattctcagaaatttctttctgatgtctgcattcaactcatagagttgaacattccctttcataggacaggtttgaaatactctttctgtagtatctggatgtggacatgtggagcgctttgatgcctacagtgaaaaagtaaatatcttcccataaaaacgagacagaaggattctcagaaacaagtttgtgatgtgtgtactcagctaacagagtggaacctttctttttacagagcagctttgaaactctatttttgtggattctgcaaattgatatttagattgctttaacgatatcgttggaaaagggaatatcgtcatacaaaatctggacagaagcattctcacaaacagctttgtgacgtgtgtcctcaactaacagagttgaacctttcttttgatgcagcagtttggaaacacccttttggtagaaactgtaagtggatatttggatagctctaacgatttcgttggaaacgggaatatcatcatctaaaatctagacagaagcactattagaaactacttggtgatatctgcattcaagtcacagagttgaacattcccttactttgagcacgtttcaaacactcttttggaagaatctggaagtggacatttggagcgctttgatgcctttggtgaaaaggaaacgtcttccaataaaagccagacagaagcattctcagaaacttgttggtgatgtgtgtactcaactaaaagagttgaacctttctattgatagagcagttttgaaacactctttttgtggattctgcaagtggatatttggattgctttgaggatttcgttggaagcgggaattcgtataaacactagacagcagcattcccagaaatttctttcggatatttccattcaactcatagagatgaacatggcctttcatagagcaggtttcaaacactctttttgtagtttgtggaagtggacatttcgatcgccttgacgcctacggtgaaaaaggaaatatcttcccataaaaaatagacagaagcatcctcagaaacttgttgctgatatgtgtcctcaactaacagagttgaactttgccattgatagagagcagttttgaaacactctttttgtggaatctgcaagtggatatttggatagcttggaggatttcgttggaagcgggaattcaaataaaaggtagacagcagcattctcagaaattactttctgatgtctgcattcaactcattgagttgaagattccctttcatagagcaggtttgaaacactctttctgtagtatctggatgtggtcatttggagcgctttgatacctacggtgaaaaagtaaatatcttcccatgaaaactagacagaaggattctgagaaacaagtttgtgatgtgtgtactcagctaacagagtggaacctctcttttgatgcagcagtttggaaacactctttttgtagaaactgtaagtggatatttggatagctctaatgatttcgttggaaacgggaatatcatcatctaaaatctagacagaagccctctcagaaactacttggtgatatctgcattcaagtcacagagttgaacattcgctttcttagagcacgtttgaaacactctttttgtagtgtctggaagtggacatttggagcgctttgatgcctttggtgaaaaagggaatgtcttcccacaaaaactagacagaagcattctcagaaacttgtttgtgatgtgtgcacccagctaaaggagttgaacatttctattgatagagcagttttgaagcactctttttgtggaaaatgcaagtggatatttggatagcttggaggatttcgttggaagcgggagttcaaataaaaggtagacagcagcattctcagaaatttctttctgatgtctgcattcaactcatagagttgaagattccctttcatagagcaggtttgaaacactctttctggagtatctggatgtggacatttggagcgctttgatgcctacggtgaaaaagtaaatatcttcccataaaaacgagacagaaggattctcagaaacaagtttgtgatgtgtgtactcagctaacagagtggaacctttcttttttgcagagcagctttgaaactctatttttgtggattctgcaaattgatatttagattgctttaacgatatcgttggaaaagggaatatcgtcatacaaaatctagacagaagcattctcacaaacttctttgtgacgtgtgtcctcaactaacagagttgaacctttcttttgatgcagcaatttggaaacacccttttggtagaaactgtaactggatatttggatagctctagcgatttcgttggaaacgggaatatcatcatctaaaatctagacagaagcactattagaaactacttggtgatatctgcattcaagtcacagagttgaacattcccttactatgagcacgtttgaaacactcttttggtagaatctggaagtggacatttggagcactttgatgcctttggtgaaaaggaaacgtcttccaataaaagccagacagaagcattctcagaaacttgttcgtgatgtgtgtactcaactaaaagagttgaacctttctattgatagagcagttttgaaacactctttttgtggattctgcaagtggatatttggattgctttgaggatttcgttggaagcgggaattcgtataaacactagacagcagcattcccagaaatttctttcggatatttccattcaactcatagagatgaacatggcctttcatagagcaggtttgaaacactctttttgtagtttgtggaagtggacatttcggatcgccttgacgcctacgctgaaaaaggaaatatcttcccataaaaaatagacagaaagcattctcagaaacttgttggtgatatgtgtcctcaactaacagagttgaactttgccattgatagagagcagttttgaaacactctttttgtggaatctgcaagtggatatttggatagcttggaggattttgttggaagcgggaattcaaataaaaggtagacagcagcattctcagaaatttctttctgatgtctgcattcaactcatagagttgaagattccctttcatagagcaggtttgaaacactctttctggagtatctgattgtggacatttggagcgctttgatgcctacggtgaaaaagtaaatatcttcccataaaaacgagacagaaggattctgagaaacaagtttgtgatgtgtgtactcagctaacagagtggaacctctcttttgatgcagcagtttggaaacactctttttgtagaaactgtaagtggatatttggatagctctaatgatttcgttggaaacgggaatatcatcatctaaaatctagacagaagccctctcagaaactactttgtgatatctgcattcaagtcacagagttgaacattcgctttcttagagcacgtttgaaacactctttttgtagtgtctggaagtggacatttggagcgctttgattcctttggtgaaaaagggaatgtctacccataaaaactagacagaagcattctcagaaacttgtttgtgatgtgtgtacccagccaaaggagttgaacatttctattgatagagcagttttgaaacattctttttgtggaaaatgcaagtggatatttggatagcttggaggatttcgttggaagcgggaattcaaataaaaggtagacagcagcattctcagaaatttctttctgatgtctgcattcaactcatagagttgaagattccctttcatagagcaggtttgaaacactgtttctggagtatctggatgtggacatttggagcgctttgatgcctacggtgaaaaagtaaatgtcttcccataaaaacgagacagaaaggattctgagagacaagtttgtgatgtgtgtactcagctaacagagtggaacctttctttttacagagcagctttgaaactctatttttgtggattctgcaaatggatatttagattgctttaacgatatcgttggaaaagggaatatcgtcatacaaaatctggacagaagcattctcacaaacttctttgtgatgtgtgtcctcaactaacagagttgaacctttcttttgatgcagcagtttggaaacactctttttgtagaaactgtaagtggatatttggatagctctaacgatttcgttggaaacgggaatatcatcatctaaaatctagacagaagcactattagaaactacttggtgatatctgcattcaagtcacagagttgaacattcccttactttgagcacgtttcaaacactcttttggaagaatctggaagtggacatttggagcgctttgatgcctttggtgaaaaggaaacgtcttccaataaaagccagacagaagcattctcagaaacttgttcgtgatgtgtgtacctcaactaaaagagttgaacctttctattgatagagcagttttgaaacactctttttgtggattctgcaagtggatatttggattgctttgaggatttcgttggaagcgggaattcgtataaacactagacagcagcattcccagaaatttctttcggatatttccattcaactcatagagatgaacatggcctttcatagagcaggtttgaaacactctttttgtagtttgtggaagtggacatttcgatcgccttgacgcctacggtgaaaaaggaaatatcttcccataaaaaatagacagaagcattctcagaaacttgttggtgatatgtgtcctcaactaacagagttgaactttgccattgatagagagcagttttgaaacactctttttgtggaatgtgcaagtggatatttggatagcttggaggatttcgttggaagcgggaattcaaattaaaggtagacagcagcattctcagtaaatttctttctgatgtctgcattcaactcatagagttgaagattccctttcatagagcaggtttgaaacactctttctggagtatctggatgtggacatttggagcgctttgatgcctacggtgaaaaagtaaatatcttcccataaaaacgagacagacggattctcagaaacaagtttgtgatgtgtgtactcagctaacagagtggaacctctcttttgatgcagcagtttggaaacactctttttgtagaaactgtaagtggatatttggatagctctaatgatttcgttggaaacgggaatatcatcatctaaaatctagacagaagccctctcagaaactactttgtgatatctgcattcaagtcacagagttgaacattcgctttcttagagcacgtttgaaacactctttttgtagtgtctggaagtggacatttggagcgctttgatgcctttggtgaaaaagggaatgtcttcccataaaaactagacagaagcattctcagaaacttgtttgtgatgtgtgtacccagccaaaggaattgaacatttctattgatagagcagttttgaaacactctttttgtggaaaatgcaggtggatatttggatagcttggaggatttcgttggaagcgggaattcaaataaaagttagacagcagcattctcagaaatttctttctgatgtctgcattcaactcatagagttgaagattccctttcatagagcaggtttgaaactggatgtggacatttggagcgctttgatgcctacggtgaaaaagtaaatatcttcccagaaaaacgagacagaaggattctgagaaacaagtttgtgatgtgtgtactcagctaacagagtggaacctttctttttacagagcagctttgaaactctatttttgtggattctgcaaatggatatttagattgctttaacgatatcgttggaaaagggaatatcgtcatacaaaatctagacagaagcattctcacaaacttcctttgtgatgtgtgtcctcaactaacagagttgaacctttcttttgatgcagcagtttggaaacacccttttggtagaaactgtaagtggatatttggatagctctaacgatttcgttggaaacgggaatatcatcatctaaaatctagacagaagcactattagaaactacttggtgatatctgcattcaagtcacagaattgaacattcccttattttgagcacgtttgaaacactcttttggaagaatctggaagtggacatttggagcgctttgatgcctttggtgaaaaggaaacgtcttccaataaaagccagacagaagcattctcagaaacttgttcgtgatgtgtgtactcaactaaaagatttgaacctttctattgatagagcagttttgaaacactctttttgtggattctgcaagtggatatttggattgctttgaggatttcgttggaagcgggaattcgtataaaaactagacagcagcattcccagaaatttctttcggatatttccattcaacttatagagatgaacatcgcctttcatagagcaggtttgaaacactctttttgtagtttgtggaagtggacatttcgatcgccttgatgcctacggtgaaaaaggaaatatcttcccataaaaaatagacagaagcattctcagaaacttgttggtgatatgtgtcctcaactaacagagttgaactttgccattgatagagagcagttttgaaacactctttttgtggaatctgcaagtggatatttggatagcttggaggatttcgttggaagcgggaattcaaataaaaggtagacagcaggattctcagaaacaagtttgtgatgtgtgtactcagctaacagagtggaacctttctttttacagagcagctttgaaactctatttttgtggattctgcaaatggatatttagattgctttaacgatatcgttggaaaagggagtatcgtcatacaaaatctggacagaagccctctcagaaactactttgtgatatctgcattcaactcacagagttgaacattcgctttcttagagcacgtttgaaacactctttttgtagtgtctggaagtggacatttggagcgctttgatgcctttggtgaaaaagggaacgtcttcccataaaaactagacagaagcattctcagaaacttgtttgtgatgtgtgtacccagccaaaggagttgaacatttctattgatagagcagttttgaaacactctttttgttgaaaatgcaggtggatatttggatagcttggaggatttcgttggaagcgggaactcaaataaaaggtagacagcaggattctcagaaacaagtttgtgatgtgtgtactcagctaacagcagtggaacctttctttttacagagcagctttgaaactctatttttgtggattctgcaaattgatatttagattgctttaacgatatcgttggaaaagggaatatcgtcatacaaaatctagacagaagcattatcacaaacttctttgtgatgtgtgtcctcaactaacagagttgaacctttcttttgatgcagcagtttggaaacactctttttgtagaaactgtaagtggatatttggatagctctaacgatttcgttggaaacgggaatatcatcatctaaaatctagacagaagcactattagaaactacttggtgatatctgcattcaagtcacagagttgaacattcccttactttgagcacgtttcaaacactcttttggaagaatctggaagtggacatttggagcgctttgatgcctttggtgaaaaggaaacgtcttccaataaaagccagacagaagcattctcagaaacttgttcgtgatgtgtgtactcaactaaaagagttgaacctttctattgatagagcagttttgaaacactctttttgtggattctgcaagtggatatttggattgctttgaggatttcgttggaagtgggaattcgtataaacactagacagcagcattcccagaaatttctttcggatatttccattcaactcatagagatgaacatcgcctttcatagagcaggtttgaaacactctttttgtagtttgtggaagtggacatttcgatcgccttgacgcctacggtgaaaaaggaaatatcttctcataaaaaatagacagaagcattctcagaaacttgttggtgatatgtgtcctcaactaacagagttgaactttgccattgatagagagcagttttgaaacactctttttgtggaatctgcaagtggatatttggatagcttggaggatttcgttggaagcgggaattcaaataaaaggtagacagcagcattctcagaaatttctttctgatgtctgcattcaactcatagagttgaagattccctttcatagagcaggtttgaaacactctttctgtagtatctggatgtggacatttggagcgctttgatgcctacggtgaaaaagtataatcttcccataaaaacgagacagaaggattctgagaaacaagtttgtgatgtgtgtactcagctaacagagtggaacgtctcttttgatgcagcagtttggaaacactctttttgtagaaactgtaagtggatatttggatagctctaatgatttcgttggaaacgggaatatcatcatctaaaatctagacagaagccctctcagaaactactttgtgatatctgcattcaagtcacagagttgaacattcgctttcttagagcacgttggaaacactctttttgtagtgtcttgaagtggacatttggagcgctttgatgcctttggtgaaaaagggaacgtcttcccataaaaactagacagaagcattctcagaaacttgtttgtgatgtgtgtacccagccaaaggagttgaacatttctattgatagagcagttttgaaacactctttttgtggaaaatgcaagtggatatttggatagcttggaggatttcgttggaagcgggaattcaaataaaaggtagacagcaagcattctcagaaatttccttctgatgtctgcattcaactcatagagttgaagattccctttcatagagcaggtttgaaacactctttctggagtatctggatgtggacatttggagcgctttgatgcctgcggtgaaaaagtaaatatcttcccataaaaacgagacagaaggattctcagaaacaagtttgtgatgtgtgtactcagctaacagagtggaacctttctttttacagagcagctttgaaactctatttttgtggattctgcaaattgatatttagattgctttaacgatatcgttggaaaagggaatatcgtcatacaaaatctagacagaagcattctcacaaacttctttgtgatgtgtgtcctcaactaacagagttgaacctttcttttgatgcagcaatttggaaacacccttttggtagaaactgtaactggatatttggatagctctaacgatttctttggaaacgggaatatcatcatctaaaatgagacagaatcactattagaaactacttggtgatatctgcattcaagtcacagagttgaacattcccttactttgagcacgtttcaaacactcttttggaagaatctggaagtggacatttggagcgctttgatgcctttggtgaaaaggaaacgtcttccaataaaagccagacagaagcattctcagaaacttgtttgtgatgtgtgtactcaactaaaagagttgaacctttctattgatagagcagttttgaaacactctttttgtggattctgcaagtggatatttggattgctttgaggatttcgttggaagcgggaattcgtataaaaactagacagcagcattcccagaaatttctttcggatatatccattcaactcatagagatgaacatggcctttcatagagcaggtttgaaacactctttttgtagtttgtgaaagtggacatttcgatcgccttgacgcctacggtgaaaaagggaatatcttcccttaaaaaatagacagaagcattctcagaaacttgttggtgatatgtgtcctcaactaacagagttgaactttgccattgatagagagcagttttgaaacactctttttgtggaatctgcaagtggatatttggatagcttggaggatttcgttggaagcgggaattcaaataaaaggtagacagcagcattctcagaaatttctttctgatgtctgcattcaactcatagagttgaagattccctttcatagagcaggtttgaaacactctttctgtagtatctggatgtggacatttggagcgctttgatgcctacggtgaaaaagtaaatatcttcccataaaaacgagacagaaggattctgagaaacaagtttgtgatgtgtgtactcagctaacagagtggaacctctcttttgatgcagcagtttggaaacactctttttgtagaaactgtaagtggatatttggatagctctaatgatttcgttggaaacgggaatatcatcatctaaaatctagacagaagcactctcagaaactactgtgtgatatctgcattcaagtcacagagttgaacattcgctttcttagagcacgtttgaaacactctttttgtagtggctggaagtggacatttggagcgctttgattcctttggtgaaaaagggaatgtctacccataaaaactagacagaagcattctcagaaacttgtttgtgatgtgtgtacccagccaaaggagttgaacatttctattgatagagcagttttgaaacgctctttttgtggaaaatgcaggtggatatttggatagcttggaggatttcgttggaagcgggaattcaaataaaaggtagacagcaggattctcagaaacaagtttgtgatgtgtgtactcagctaacagagtggaacctttctttttacagagcagctttgaaactctatttttgtggattctgcaaattgatatttagattgctttaacgatatcgttggaaaagggaatatcgtcatacaaaatctagacagaagcattctcacaaacttctttgtgatgtgtgtcctcaactaacagagttgaacctttcttttgatgcagcaatttggaaacacccttttggtagaaactgtaactggatatttggatacctctaacgatttcgttggaaacgggaatatcatcatctaaaatgtagacagaagcactattagaaactacttggtgatatctgcattcaagtcacagagttgaacattcccttactttgagcacgtttgaaacactcttttggaagaatctggaagtggacatttggagcgctttgatgcctttggtgaaaaggaaacgtcttccaataaaagccagacagaagcattctcagaaacttgttcgtgatgtgtgtactcatctaaaagagttgaacctttctattgatagagcagttttgaaacactctttttgtggattctgcaagtggatatttggattgctttgaggatttcgttggaagcgggaattcgtataaacactagacagcagcattcccagaaatttctttcggatatttccattcaactcatagaggtgaacatggcctttcatagagcaggtttgaaacactctttttgtagtttgtggaagtggacatttcgatcgccttgacgcctacggtgaaaaaggaaatatcttcccataaaaaatagacagaagcattctcagaaacttgttggtgatatgtgtcctcaactaacagagttgaactttgccattgatagagagcagttttgaaacactctttttgtggaatctgcaagtggatatttggatagcttggaggatttcgttggaagcgggaattcaaataaaaggtagacagccggattctgagaaacaagtttgtgatgtgtgtactcagctaacagagtggaacctctcttttgatgcagcagtttggaaacactctttttgtagaaactgtaagtggatatttggatagctctaatgatttcgttggaaacgggaatatcatcatctaaaatctagacagaagccctctcagaaactactttgtgatatctgcattcaagtcacagagttgaacattcgctttcttagagcacgttggaaacactctttttgtagtgtctggaagtggacatttggagcgctttgatgactttggtgaaaaagggaacgtcttcccataaaaactagacagaagcattctcagaaacttgtttgtgatgtgtgtacccagccaaaggagttgaacatttctattgatagagcagttttgaaacactcttgttgtggaaaatgcaggtggatatttggatagcttggaggatttcgttggaagcgggaattcaaataaaaggtagacagcagcattctcagaaatttctttctgatgtctgcattcaactcatagagttgaagattccctttcatagagcaggtttgaaacactcgttctggagtatctggatgtggacatttggagcgctttgatgcctacggtggaaaagtaaatatcttcccataaaaacgagacagaaggattctcagaaacaagtttgtgatgtgtgtactcagctaacagagtggaacctttctttttacagagcagctttgaaactctatttttgtggattctggaaattgatatttagattgctttaacgatatcgttggaaaagggaatatcgtcatacaaaatgctggacagaagcattctcacaaacttctttgtgatgtgtgtcctcaactaacagagttaaacctttcttttgatgcagcaatttggaaacacccttttggtagaaactgtaactggatatttggatagctctaacgatttcgttggaaacgggaatatcatcatctaaaatctagacagaagcactattagaaactacttggtgatatctgcattcaagtcacagagttgaacattcccttactttgagcacgtttgaaacactcttttggaagaatctggaagtggacatttggagcgctttgatgcctttggtgaaaaggaaacgtcttccaatgaaagccagacagaagcattctcagaaacttgttcgtgatgtgtgtactcaactaaaagagttgaacctttctattgatagcgcagttttgaaacactctttttgtggattctgcaagtggatatttggattgctttgaggatttcgttggaagcgggaattcatataaaaactagacagcagcattcccagaaatttctttcggatatttccattcaactcatagagatgaacatggcctttcatagagcaggtttgaaacactctttttgtagtttctggaagtggacatttcgatcgccttgacgcctacgctgaaaaaggaaatatcttcccataaaaaatagacagaagcattctcagaaacttgttggagatatgtgtcctcaactgacagagttgaactttgccattgatagagagcagttttgaaacactctttctgtggaatctgcaagtggatatttggatagcttggaggatttcgttggaaacgggaattcaaataaaagatagacagcagcattctcagaaatttctttctgatgtctgcattcaactcatagagttgaagattccctttcatagagcaggtttgaaatactctttctgtagtatctggatgtggacatttggagcgctttgatgcctacggtgaaaaagtaaatatcttcccataaaaacgagacagaaggattctgagaaacaagtttgtgatgtgtgtactcagctaacagagtggaacctctcttttgatgcagcagtttggaaacactctttttgtagaaactgtaagtggatatttggatagctctaatgatttctttggaaacgggaatatcatcatctaaaatctagacagaagccctctcagaaactactttgtgatatctgcattcaagtcacagcagttgaacattcgctttcttagagcacgttggaaacactctttttgtagtgtctggaagtggacatttggagcgctttgatgcctttggtgaaaaagggaatgtcttcccataaaaactagacagaaagcattctcagcaaacttgtttgtgatgtgtgtacccagccaaaggagttgaacatttctattgatagagcagttttgaaacactctttttgtggaaaatgcaggtggatatttggatagcttggaggatttcgttggaagcgggaattcaaataaaaggtagacagcaggattctcagaaacaagtttgtgatgtgtgtactcagctaacagagtggaacctttctttttacagagcagctttgaaactctatttttgtggattctgcaaattgatatttagattgctttaacgatatcgttggaaaagggaatatggtcatacaaaatctagacagaagcattctcacaaacttctttgtgatgtgtgtcctcaaataacacagttgaacctttcttttgatgcagcagtttggaaacacccttttggtagaaactgtaagtggatatttggatagatctaacgatttcgttggaaacgggaatatcatcatctaaaatctagacagaagcactattagaaactacttggtgatatctgcattcaagtcacagagttgaacattcccttactttgagcacgtttcaaacactcttttggaagaatctggaagtggacatttggagcgctttgatgcctttggtgaaaaggaaacgtcttccaataaaagccagacagaagcattctcagaaacttgttcgtgatgtgtgtactcaactaaaagagttgaacctttctattgatagagcagttttgaaacactctttttgtggattctgcaagtggatatttggattgctttgaggatttcgttggaagcaggaattcgtataaacactagacagcagcattcccagaaatttctttcggatatttccattcaactcatagagatgaacatggcctttcatagagcaggtttgaaacactctttttgtagtttgtggaagtggacatttcgatcgccttgacgcctacgctgaaaaaggaaatatcttcccataaaaaatagacagaagcattctcagaaacttgttggtgatatgtgtcctcaactaacagagttgaactttgccattgatagagagcagttttgaaacactctttttgtggaatctgcaagtggatatttggatagcttggaggatttcgttggaagcgggaattcaaataaaaggtagacagcagcattctcagaaatttctttctgatgtctgcattcaactcatagagttgaagattccctttcatagcagcaggtttgaaacactctttctggagtatctggatgtggacatttggagcgctttgatgcctacggtgaaaaagtaaatatcttcccataaaaacgacacagaaggattctcagaaacaagtttgtgatgtgtgtactcagctaacagagtggaacctctcttctgatgcagcagtttggaaacactctttttgtagaaactgtaagtggatatttggatagctctaatgatttcgttggaaacgggaatatcatcatctaaaatctagacagaagccctctcagaaactactttgtgatatctgcattcaagtcacagagttgaacattcgctttcttagagcacgtttgaaacactctttttgtagtgtctggaagtggacatttggcgcgctttgatgcctttggtgaaaaagggaatgtcttcccataaaaactagacagaagcattctcagaaacttgtttgtgatgtgtgtacccagccaaaggagttgaacatttctattgatagagcagttttgaaacgctctttttgtggaaaatgcaggtggatatttggatagcttggaggatttcgttggaagcgggagttcaaataaaaggtagacagcagcattctcagaaatttctttctgatgtctgcattcaactcatagagttgaagattccctttcatagagcaggtttgaaacactctttctggagtatctggatgtggacatttggagcgctttgatgcctacggtgaaaaagtaaatatcttcccataaaaacgagacagaaggattctgagaaacaagtttgtgatgtgtgtactcagctaacagagtggaacctttctttttacagagcagctttgaaactctatttttgtggattctgcaaattgatatttagattgctttaacgatatcgttggacaagggaatatggtcatacaaaatctagacagaagcattctcacaaacttctttgtgatgtgtgtcctcaactaacagagttgaacctttcttttgatgcagcaatttggaaacacccttttggtagaaactgtaactggatatttggatagctctaacgatttcgttggaaacgggaatatcatcatcaaaatgtagacagaagcactattagaaactacttggtgatatctgcattcaagtcacagagttgaacattcccttactttgagcacgtttgaaacactcttttggaagaatctggaagtggacatttggagtgctttgatgcctttggtgaaaaggaaacgtcttccaataaaagccagacagaagcattctcagaaacttgtttgtgatgtgtgtactcaactaaaagagttgaacctttctattgatagagcagttttgaaacactctttttgtggattctgcaagtggatatttggattgctttgaggatttcgttggaagcgggaattcgtataaaaactagacagcagcattcccagaaatttctttcgggtatttccattcgactcatagagatgaacatggcctttcatagagcaggtttgaaacactctttttgtagtttgtggaagtggacatttcgatcgccttgacgcctacggtgaaaaaggaaatatcttcccataaaaaatagacagaagcattctcagaaacttgttggtgatatgtgtcctcaactaacagagttgaactttgccattgatagagagcagttttgaaacactctttttgtggaatctgcaagtggatatttggatagcttggaggatttcgttggaagcgggaattcaaataaaaggtagacagcagcattctcagaaatttctttctgatgtctgcattcaactcatagagttgaagattccatttcatagagcaggtttgaaacactctttctggagtatctggatgtggacatttggagcgctttgatgcctacggtgaaaaagtaaatatcttcccataaaaacgagacagaaggattctgagaaacaagtttgtgatgtgtgtactcagctaacagagtggaacctctcttttgatgcagcagtttggaaacactctttttgtagaaactgtaagtggatatttggatagctctaatgatttcgttggaaacgggaatatcatcatctaaaatctagacagaagcactctcagaaactactttgtgatatctgcattcaagtcacagagttgaacattcgctttcttagagcacgtttgaaacactctttttgtagtgtctggaagtggacatttggagcgctttgattcctttggtgaaaaagggaatgtccacccataaaaactagacagaagcattctcagaaacttgtttgtgatgtgtgtacccagccaaaggagttgaacatttctattgatagagcagttttgaaacactctttttgtggaaaatgcaggtggatatttggatagctttgaggatttcgttggaagcgggaattcaaataaaaggtagacagcagcattctcagaaatttctttctgatgtctgcattcaactcatagagttgaagattccctttcatagagcaggtttgaaacactcgttctggagtatctggatgtggacatttggagcgctttgatgcctacggtggaaaagtaaatatcttcccataaaaacgagacagaaggattctcagaaacaagtttgtgatgtgtgtactcagctaacagagtggaacctttctttttacagagcagctttgaaactctatttttgtggattctgcaaattgatatttagattgctttaacgatatcgttggaaaagggaatatcgtcatacaaaatgtagacagaagcattctcacaaacttctttgtgatgtgtgtcctcaactaacagagttgaacctttcttttgatgcagcaatttggaaacacccttttggtagaaactgtaactggatatttggatagctctagcgatttcgttggaaacgggaatatcatcatctaaaatgtagacagaagcactattagaaactacttggtgatatctgcattcaagtcacagagtagaacattcccttacttcgagcacgtttgaaacactcttttggaagaatctggaagtggacatttggagcgctttgatgcctttggtgaaaaggaaacgtcttccaataaaagccagacagaagcattctcagaaacttgtttgtgatgtgtgtactcaactaaaagagttgaacctttctattgatagagcagttttgaaacactctttttgtggattctgcaagtggatatttggattgctttgaggatttcgttggaagcgggaattcgtataaaaactagacagcagcattcccagaaatttctttcggatatttccattcaactcatagagatgaacatggcctttcatattgaaacacgctttttgtagtttgtggaagtggacatttcgatcgccttgacgcctacggtgaaaaaggaaatatcttcccataaaaaatagacagaagcattctcagaaacttgttggtgatatgtgtcctcaactaacagagttgaactttgccattgatagagagcagttttgaaacactctttttgtggaatctgcaagtggatatctggatagcttggaggatttcgttggaagcgggaattcaaataaaaggtagacagcaggattctgagaaacaagtttgtgatgtgtgtactcagctaacagagtggaacctctcttttgatgcagcagtttggaaacactctttttgtagaaactgtaagtggatatttggatagctctaatgatttcgttggaaacgggaatatcatcatctaaaatctggacagaagccctctcagaaactactttgtgatatctgctttcaagtcacagagttgaacattcgctttcttagagcacgttggaaacactctttttgtagtgtctggaagtggacatttggagcgctttgatgcctttggtgaaaaagggaatgtcttcccataaaaactagacagaagcattctcagaaacttgtttgtgatgtgtgtacccagccaaaggagttgaacatttctattgatagagcagttttgaaacgctctttttgtggaaaatgcaggtggatatttggatagcttggaggatttcgttggaagcgggaattcaaataaaaggtagacagcagcattctcagaaatttctttctgatgtctgcattcaactcatagagttgaagattccctttcatagagcaggtttgaaacactcgttctggagtatccggatgtggacatttggagcgctttgatgcctacggtggaaaagtaaatatcttcccataaaaacgagacagaaggattctgagaaacaagtttgtgatgtgtgtactcagctaacagagtggaacctttctttttacagagcagctttgaaactctatttttgtggattctgcaaatggatatttagattgctttaacgatatcgttggaaaagggaatatcgtcatacaaaatctagacagaagcattctcacaaacttctttgtgatgtgtgtcctcaactaacagagttgaacctttcttttgatgcaacaatttggaaacacccttttggtagaaactgtaactggatatttggatagctcaaacgatttcgttggaaacgggaatatcatcatctaaaacctagacagaagcactattagaaactacttggtgatatctgcattcaagtcacagagttgaacattcccttactttgagcacgtttgaaacactcttttggaagaatctggaagtggacatttggagcgctttgatgcctttggtgaaaaggaaacgtcttccaataaaagccagagagaagcattctcagaaacttgttcgtgatgtgtgtactcaactaaaagagttgaacctttctattgatagagcagttttgaaacactctttttgtggattctgcaagtggatatttggattgctttgaggatttcgttggaagcgggaattcgtataaacactagacagcagcattcccagaaatttctttcggatatttccattcaactcatagagatgaacatggcctttcatattgaaacactctttttgtagtttgtggaagtggacatttcgatcgccttgacgcctgcggtgaaaaaggaaatatcttcccataaaaaatagacagaagcattctcagaaacttgttggtgatatgtgccctcaactaacagagttgaactttgccattgatagagagcagttttgaaacactctttttgtggaatctgcaagtggatattttgatagcttggaggatttcgttggaagcgggaattcaaataaaaggtagacagcagcattctcagaaatttctttctgatgtctgcattcaactcatagagttgaacattccctttcatagagcaggtttgaaacactctttctggagtatctggatgtggacatttggagcgctttgatgcctacggtgaaaaagtaaatatcttcccataaaaacgagacagaaggattctgagaaacaagtttgtgatgtgtgtactcagctaacagagtggaacctctcttttgatgcagcagtttggaaacactctttttgtagaaactgtaagtggatatttggatagctctaatgatttcgttggaaacgggaatatcatcatctaaaatgctagacagaagccctctcagaaactactttgtgatatctgcattcaagtcacagagttgaacattcgctttcttagagcacgttggaaacactctttttgtagtgtccggaagtggacatttggagcgctttgatgcctttggtgaaaaagggaatgtcttcccataaaaactagacagaagcattctcagaaacttgtttgtgatgtgtgtacccagctaaaggagttgaacatttccattgatagagcagttttgaaacactctttttgtggaaaatgcaagtggatatttggatagcttggaggatttcgttggaagcgggaattcaaataaaaggtagacaggaggattctgagaaacaagtttgtgatgtgtgtactcagctaacagagtggaacctttctttttacagagcagctttgaaactctaattttgtggattctgcaaatggatatttagattgctttaatgatatcgctggaaaagggaatatggtcatacaaaatctagacagaagcattctcacaaacttctttgtgacgtgtgtcctcaactaacagagttgaacctttcttttgatgcagcagtttggaaacactgtttttgtagcaactgtaagtggatatttggatagctctaacgatttcgttggaaacgggaatatcatcatgctaaaatctagacagaagcattctcagaaatttctttctgatgtctgcattcaactcatagagttgaacattcccttactttgagcacgtttgaaacactcttttggaagaatctggaagtggacatttggagcgctttgatgcctttggtgaaaaggaaacgtcttccaataaaagccagacagaagcattctcagaaacttgttcgtgatgtgtgtactcaactaaaagagttgaacctttctattgatagagcagttttgaaacactctttttgtggattctgcaagtggatatttggattgttttgaggatttcgttggaagcgggaattcgtataaacactagacagcagcattcccagaaatttctttcggatatttccattcaactcatagagatgaacatggcctttcatagagcaggtttgaaacactctttttgtagtttgtggaagtggacatttcgatcgccttgacgcctacggtgaaaaaggaaatatcttcccataaaaaatagacagaagcattctcagaaacttgttggtgatatgtgtcctgaactaacagagttgaactttgccattgatagagagcagttttgaaacactctttgtgtggaatctgcaagtggatatttggatagtttggaggatttcgttggaagcgggaattcaaataaaaggtagacagcagcattctcagtaaatttctttctgatgtctgcattcaactcatagagttgaagattccctttcatagagcaggtttgaaacactctttctggagtatctggatgtggacatttggagcgctttgatgcctacggtgaaaaagtaaatatcttgccataaaaacgacacagaaggattctgagaaacaagtttgtgatgtgtgaactcagctaacagagtggaacctctcttttgatgcagcagtttggaaacactctttttgtagaaactgtaagtggatatttggatagctctaatgatttcgttggaaacgggaatatcatcatctaaaatctagacagaagccctctcagaaactactttgtgatatctgcattcaagtcagagagttgaacattgggtttcttagagcacgtttgaaacactctttttgtagtgtctggaagtggacatttggagcgctttgatgcctttggtgaaaaagggaatgtcttcccataaaaactagacagaagcattctcagaaacttgtttgtgatgtgtgtacccagccaaaggagttgaacatttctattgatagagcagttttgaaacactcttgttgtggaaaatgcaggtggatatttggatagcttggaggatttcgttggaagcgggaattcaaataaaaggtagacagcagcattctcagaaatttctttctgatgtctgcattcaactcatagagttgaagattccctttcatagagcaggtttgaaacactcgttctggagtatctggatgtggacatttggagcgctttgatgcctacggtggaaaagtaaatatcttcccataaaaacgagacagaggattctcagaaacaagtttgtgatgtgtgtactcagctaacagagtggaacctttctttttacagagcagctttgaaactctatttttgtggattctgcaaatggatatttagattgctttaatgatatcgctggaaaagggaatatggtcatacaaaatactagacagaagcattctcacaaacttctttgtgacgtgtgacctcaactaacagagttgaacctttcttttgatgcagcagtttggaaacactgtttttgtagcaactgtaagtggatatttggatagctctaacgatttcgttggaaacgggaatatcatcatctaaaatctagacagaagcactattagaaactacttggtgatatctgcattcaagtcacagagtagaacattcccttacttcgagcacgtttgaaacactcttttggaagaatctggaagtggacatttggagcgctttgatgcctttggtgaaaaggaaacgtcttccaataaaagccagacagaagcattctcagaaacttgtttgtgatgtgtgtactcaactaaaagagttgaacctttctattgatagagcagttttgaaacactctttttgtggattctgcaagtggatatttggattgctttgaggatttcgttggaagctgggaattcgtataaaaactagacagcagcattcccagaaatttctttcggatatttccattcaactcatagagatgaacatggcctttcatagagcaggtgtgaaacactctttttgtagtttgtggaagtggacatttcgatcgccttgacgcctacggtgaaaaaggaaatatcttcccataaaaaatagacagaagcattctcagaaacttgttggtgatatgtgtcctcaactaacagagttgaactttgccattgatagagagcagttttgaaacactctttttgtggaatctgcaagtggatatttggatagcttggaggatttcgttggaagcgggaattcaaattaaaggtagacagcaggattctcagaaacaagtttgtgatgtgtgtactcagctaacagagtggaacctctcttttgatgcagtagtttggaaacacactttttgtagaaactgtaagtggatatttggatagctctaatgatttcgttggaaacgggaatatcatcatctaaaatctagacagaagccctctcagaaactactttgtgatatctgcattcaagtcacagagttgaacattcgctttcttagagcacgtttgaaacactctttttgtagtgtctggaagtggacatttggagcgctttgatgcctttggtgaaaaagggaacgtcttcccataaaaactagacagaagtattctcagaaacttgtttgtgatgtgtgtacccagccaaaggagttgaacatttctattgatagagcagttttgaaacactctttttgtggaaaatgcaggtggatatttggatagcttggaggatttcgttggaagcgggaattcaaataaaaggtagacagcagcattctcagaaatttctttctgatgtctgcattcaactcatagagttgaagattccctttcatagagcaggtttgaaacactcgttctggagtatctggatgtggacatttggagcgctttgatgcctacggtggaaaagtaaatatcttcccataaaaacgagacagaaggattctgagaaacaagtttgtgatgtgtgtactcagctaacagagtggaacctttctttttacagagcagctttgaaactctatttttgtggattctgcaaatggatatttagattgctttaatgatatcgctggaaaagggaatatggtcatacaaaattctagacagataagcattctcacaaacttctttgtgatgtgtgtcctcaactaacagagttgaacctttcttttgatgcagcagtttggaaacactgtttttgtagcaactgtaagtggatatttggatagctctaacgatttcgttggaaacgggaatatcatcatctaaaatctagacagaagcactattagaaactacttggtgatatctgcattcaagtcacagagttgaacattcccttactttgagcacgtttcaaacactcttttggaagaatctggaagtggacatttggagcgctttgatgcctttggtgaaaaggaaacgtcttccaataaaagccagacagaagcattctgagaaacttgttcgtgatgtgtgtactcaactaaaagagttgaacctttctattgatagagcagttttgaaacactctttttgtggattctgcaagtggatatttggattgctttgaggatttcgttggaagcgggaattcgtataaacactagacagcagcattcgcagaaatttctttcggatatttccattcaactcatagagatgaacatggcctttcatagagcaggtttgaaacactctttttgtagtttgtggaagtggacatttcgatcgccttgacgcctacggtgaaaaaggaaatatcttcccataaaaaatagacagaagcattctcagaaacttgttggtgatatgtgtcctcaactaacagagttgaactttgccattgatagagagcagttttgaaacactctttttgtggaatctgcaagtggatatttggatagcttggaggatttcgttggaagcgggaattcaaataaaaggtagacagcagcattctcagaaatttctttctgatgtctgcattcaactcatagagttgaagattccctttcatagtggaggtttgaaacacgctttctggagtatctggacgtggacatttggagcgctttgatacctacggtgaaaaagtaaatatcttcccataaaaacgagacagaaggattctcagaaacaagtttgtgatgtgtgtactcagataacagagtggaacctctcttctcatgcagcagtttggaaacacactttttgtagaaactgtaagtggatatttggatagctctaatgatttcgttggaaatgggaataccatcatctaaaatctagacagaagcactctcagaaactactttgtgatatctgcattcaagtcacagagttgaacattcgctttcttagagcacttttgaaacactctttttgtatatctggaagtggacatttggagctctttgatgcctttggtgaaaaaggaaatgtcttcccataaaaactagacagaagcattctcagaaacttgtttgtgatctgtgtacccagcgaaaggagttgaacatttctattgatagagcagttttgaaacactctttttgtggaatctgcaagtggatatttggatagcttggagtttttcgttggaagcgggaattcacataaaagctagacagcagcattctcagaaatttctttctgatgtctgcattcaactcatagagttgaagattccctttcatagagcaggtttgaaacactcgttctggagtatctggatgtggacattttggagcgctttgatgcctacggtggaaaagtaaatatcttcccataaaaacgagacagaaggattctcagaaacaagtttgtgatgtgtgtactcagctaacagagtggaacctctcttttgatgcagcagtttggaaacactctttttgtagaaactgtaagtggatatttggatagctctaatgatttcgttggaaacgggaatatcatcatctaaagtctagacagaagcattctcacaaacttctttgtgatgtgtgtcctcaactaacagagttgaacctttcttttgatgcagcaatttggaaacacccttttggtagaaactgtaactggatatttggatagctctaacgatttcattggaaacgggaatatcatcatctaaaatgtagacagaagcactattagaaactacttggtgatatctgcattcaagtctcagagttgaacattcccttactttgagcacgtttgaaacactcttttggaagaatctggaagtggacatttggagcgctttgatgcctttggtgaaaaggaaacgtcttccaataaaagccagacagaagcattctcagaaacttgtttgtgatgtgtgtactcaactaaaagagttgaacctttctattgatagagcagttttgaaacactctttttgtggattctgcaagtggatatttggattgctttgaggatttcgttggaagcgggaattcatataaaaactagacagcagcattcccagcaaatttctttcggatatttccattcaactcatagagatgaacatggcctttcatagagcaggtttgaaacactctttttgtagtttgtggaagtggacatttcgatcgccttgacgcctacgctgaaaaaggaaatatcttcccataaaaaatagacagaagcattctcagaaacttgttggtgatatgtgtcctcaactaacagagttgaactttgccattgatagagagcagttttgaaacactctttttctggaatctgcaagtggatatttggatagcttggaggatttcgttggaagcgggaattcaaataaaaggtagacagcagcattctcagaaatttctttctgatgtctgcattcaactcatagagttgaacattccctttcatagagcaggtttgaaacactctttctggagtatctggatgtggacatttggagcgctttgatgcctacggtgaaaaagtaaatatcttcccataaaagcgagacagaaggattctgagaaacaagtttgtgatgtgtgtactcagctaacagagtggaacctctcttttgatgcagcagtttggaaacactctttttgtagaaactgtaagtggatatttggatagctctaatgatttcgttggaaacgggaatatcatcatctaaaatctagacagaagcactctcagaaactactgtgtgatatctgcattcaagtcacagagttgaacattcgctttcttagagcacgtttgaaacactctttttgtagtgtctggaagtggacttttggagcgctttgattcctttggtgaaaaagggaatgtctacccataaaaactagacagaagcattctcagaaacttgtttgtgatgtgtgtacccagccaaagagttgaacatttctattgatagagcagttttgaaacactcttgttgtggaaaatgcaggtggatatttggttagcttggaggatttcgttggaagcgggaattcaaataaaaggtagacagcagcattctcagaaatttctttctgatgtctgcattcaactcatagagttgaagattccctttcatagagcaggtttgaaacactcgttctggagtatctggatgtggacatttggagcgctttgatgcctacggtggaaaagtaaatatcttcccataaaaacgagacagaaggattctgagaaacaagtttgtgatgtgtgtactcagctaacagagtggaacctttctttttacagagcagctttgaaactctatttttgtggattctgcaaatggatatttagattgctttaatgatatcgctggaaaagggaatatggtcatacaaaatatagacagaagcattctcacaaacttgtttgtgatgtgtgtcctcaactaacagagttgaacctttcttttgatgcagcaatttggaaacacccttttggtagaaactgtaactggatatttggatagctctaacgatttcgttggaaacgggaatatcatcatctaaaatctagacagaagcactattagaaactacttggtgatatctgcattcaagtcacagagttgaacattcccttactttgagcacgtttgaaacactcttttggaagaatctggaagtggacatttggagcgctttgatgcctttggtgaaaaggaaacgtcttccaataaaagccagacagaagcattctcagaaacttgttcgtgatgtgtgtactcaactaaaagggttgaacctttctattgatagagcagttttgaaacactctttttgtggattctgcaagtggatatttggattgctttgaggatttcgtaggaagcgggaattcgtataaaaactagacagcagcattcccagaaatttctttcggatatttccattcaactcatagagatgatcatggcctttcatagagcaggtttgaaacactctttttgtagtttgtggaagtggacatttcgatcgccttgacgcctacggtgaaaaaggaaatatcttcccataaaaaatagacagaagcattctcagaaacttgttggtgatatgtgtcctcaactaatagagttgaactttgccattgatagagagcagttttgaaacactctttttgtggaatctgcaagtggatatttggatagcttggaggatttcgttggaagcaggaattcaaataaaaggtagacagcagcattctcagaaatttctttgtgatgtttgcattcaactcatagagttgaacattccctttcatagagcaggtttgaaacactctttctgtactatctggatgtggacatttggaacgctttgatgcctacggtgaaaaagtaaatatcttcccataaaaactagacagacggattctgagaaacaagtttgtgatgtgtgtactcagctaacagagtggaacctctcttttgatgcagcagtttggaaacactctttttgtagaaactgtaagtggatatttggatagctgtaatgatttcgttggaaacgggaatatcatcatctaaaatctagacagaagcactctcagaaactactttgtgatatctgcattcaagtcacagagttgaacattcgctttcttagagcacgtttgaaacactctttttgtagtgtctggaagtggacatttggagcgctttgatgcctttggtgaaaaagggaatgtctacccataaaaactagacagaagcattctcagaaacttgtttgtgatgtgtgtacccagccaaaggatttgaacatttctattgatagagcagttttgaaacactcttgttgtggaaaatgcaggtggatatttggatagcttggaggatttcgttggaagcgggaattcaaataaaaggtagacagcagcattctcagaaatttctttctgatgtctgcattcaactcatagagttgaagattccctttcatagagcaggtttgaaacactcgttctggagtatctggatgtggacatttggagcgctttgatgcctacggtggaaaagtaaatatcttcccataaaaacgagacagaaaggattctcagtaaacaagtttgtgatgtgtgtactcagctaacagagtggaacctttctttttacagagcagctttgaaactctatttttgtggattctgcaaattgatatttagattgctttaacgatatcgttggaaaagggaatatggtcatacaaaatctagacagaagcattctcacaaacttctttgtgatgtgtgtcctcaactaacagagttgaacctttcttttgatgcagcaatttggaaacacccttttggtagaaactgtaactggatatttggatagctctaacgatttcgttggaaacgggaatataatcatctaaaatctagacagaagaactattagaaactacttggtgatatctgcattcaagtcacagagtagaagattcccttacttcgagcacgtttgaaacactcttttggaagaatctggaagtggacatttggagcgctttgatgcctttggtgaaaaggaaacgtcttccaataaaagccagacagaagcattctcagaaacttgtttgtgatgtgtgtactcaactaaaagagttgaacctttctattgatagagcagttttgaaacactctttttgtggattctgcaagtggatatttggattgctttgaggatttcgttggaagcgggaattcgtataaacactagacagcagcattcccagaaatttctttcggatatttccattcaactcatagagatgaacatggcctttcatagagcaggtttgaaacactctttttttagattgtagaagtggacatttcgatcgccttgaggcctaccgtgaaaaaggaaatatcttcctataaaaaatagacagaagcattctcagaaacttgtttgtgctgtgtgtacccagccaaaggagttgaacatttctattgatagagcagttttgaaactctctttttgtggaaaatgcaggtggatatttggatagcttggaggatttcgttggaagcgggaattcaaataaaaggtagacagcagcattctcagaaatttctttctgatgtctgcattcaactcatagagttgaagattccctttcatagagcaggtttgaaacactctttccggagtatctggatgtggacatttggagcgctttgatgcctacggtgaaaaagtaaatatcttcccataaaaacgagacagaaggattctgagaaacaagtttgagatgtgtgtactcagctaacagagtggaacctctcttttgatgcagcagtttggaaacactctttttgtagaaactgtaagtggatatttggatagctctaatgatttcgttggaaacgggaatatcatcatctaaaatctagacagaagccctctcagaaactactttgtgatatctgcattcaagtcacagagttgaacattcgctttcttagagcacgttggaaacactctttttgtagtgtctggaagtggacatttggagcgctttgatgcctttggtgaaaaagggaatgtcttcccataaaaactagacagannnnnnnnnnnnnnnnnnnnnnnnnnnnnnnnnnnnnnnnnnnnnnnnnnnnnnnnnnnnnnnnnnnnnnnnnnnnnnnnnnnnnnnnnnnnnnnnnnnnnnnnnnnnnnnnnnnnnnnnnnnnnnnnnnnnnnnnnnnnnnnnnnnnnnnnnnnnnnnnnnnnnnnnnnnnnnnnnnnnnnnnnnnnnnnnnnnnnnnnnnnnnnnnnnnnnnnnnnnnnnnnnnnnnnnnnnnnnnnnnnnnnnnnnnnnnnnnnnnnnnnnnnnnnnnnnnnnnnnnnnnnnnnnnnnnnnnnnnnnnnnnnnnnnnnnnnnnnnnnnnnnnnnnnnnnnnnnnnnnnnnnnnnnnnnnnnnnnnnnnnnnnnnnnnnnnnnnnnnnnnnnnnnnnnnnnnnnnnnnnnnnnnnnnnnnnnnnnnnnnnnnnnnnnnnnnnnnnnnnnnnnnnnnnnnnnnnnnnnnnnnnnnnnnnnnnnnnnnnnnnnnnnnnnnnnnnnnnnnnnnnnnnnnnnnnnnnnnnnnnnnnnnnnnnnnnnnnnnnnnnnnnnnnnnnnnnnnnnnnnnnnnnnnnnnnnnnnnnnnnnnnnnnnnnnnnnnnnnnnnnnnnnnnnnnnnnnnnnnnnnnnnnnnnnnnnnnnnnnnnnnnnnnnnnnnnnnnnnnnnnnnnnnnnnnnnnnnnnnnnnnnnnnnnnnnnnnnnnnnnnnnnnnnnnnnnnnnnnnnnnnnnnnnnnnnnnnnnnnnnnnnnnnnnnnnnnnnnnnnnnnnnnnnnnnnnnnnnnnnnnnnnnnnnnnnnnnnnnnnnnnnnnnnnnnnnnnnnnnnnnnnnnnnnnnnnnnnnnnnnnnnnnnnnnnnnnnnnnnnnnnnnnnnnnnnnnnnnnnnnnnnnnnnnnnnnnnnnnnnnnnnnnnnnnnnnnnnnnnnnnnnnnnnnnnnnnnnnnnnnnnnnnnnnnnnnnnnnnnnnnnnnnnnnnnnnnnnnnnnnnnnnnnnnnnnnnnnnnnnnnnnnnnnnnnnnnnnnnnnnnnnnnnnnnnnnnnnnnnnnnnnnnnnnnnnnnnnnnnnnnnnnnnnnnnnnnnnnnnnnnnnnnnnnnnnnnnnnnnnnnnnnnnnnnnnnnnnnnnnnnnnnnnnnnnnnnnnnnnnnnnnnnnnnnnnnnnnnnnnnnnnnnnnnnnnnnnnnnnnnnnnnnnnnnnnnnnnnnnnnnnnnnnnnnnnnnnnnnnnnnnnnnnnnnnnnnnnnnnnnnnnnnnnnnnnnnnnnnnnnnnnnnnnnnnnnnnnnnnnnnnnnnnnnnnnnnnnnnnnnnnnnnnnnnnnnnnnnnnnnnnnnnnnnnnnnnnnnnnnnnnnnnnnnnnnnnnnnnnnnnnnnnnnnnnnnnnnnnnnnnnnnnnnnnnnnnnnnnnnnnnnnnnnnnnnnnnnnnnnnnnnnnnnnnnnnnnnnnnnnnnnnnnnnnnnnnnnnnnnnnnnnnnnnnnnnnnnnnnnnnnnnnnnnnnnnnnnnnnnnnnnnnnnnnnnnnnnnnnnnnnnnnnnnnnnnnnnnnnnnnnnnnnnnnnnnnnnnnnnnnnnnnnnnnnnnnnnnnnnnnnnnnnnnnnnnnnnnnnnnnnnnnnnnnnnnnnnnnnnnnnnnnnnnnnnnnnnnnnnnnnnnnnnnnnnnnnnnnnnnnnnnnnnnnnnnnnnnnnnnnnnnnnnnnnnnnnnnnnnnnnnnnnnnnnnnnnnnnnnnnnnnnnnnnnnnnnnnnnnnnnnnnnnnnnnnnnnnnnnnnnnnnnnnnnnnnnnnnnnnnnnnnnnnnnnnnnnnnnnnnnnnnnnnnnnnnnnnnnnnnnnnnnnnnnnnnnnnnnnnnnnnnnnnnnnnnnnnnnnnnnnnnnnnnnnnnnnnnnnnnnnnnnnnnnnnnnnnnnnnnnnnnnnnnnnnnnnnnnnnnnnnnnnnnnnnnnnnnnnnnnnnnnnnnnnnnnnnnnnnnnnnnnnnnnnnnnnnnnnnnnnnnnnnnnnnnnnnnnnnnnnnnnnnnnnnnnnnnnnnnnnnnnnnnnnnnnnnnnnnnnnnnnnnnnnnnnnnnnnnnnnnnnnnnnnnnnnnnnnnnnnnnnnnnnnnnnnnnnnnnnnnnnnnnnnnnnnnnnnnnnnnnnnnnnnnnnnnnnnnnnnnnnnnnnnnnnnnnnnnnnnnnnnnnnnnnnnnnnnnnnnnnnnnnnnnnnnnnnnnnnnnnnnnnnnnnnnnnnnnnnnnnnnnnnnnnnnnnnnnnnnnnnnnnnnnnnnnnnnnnnnnnnnnnnnnnnnnnnnnnnnnnnnnnnnnnnnnnnnnnnnnnnnnnnnnnnnnnnnnnnnnnnnnnnnnnnnnnnnnnnnnnnnnnnnnnnnnnnnnnnnnnnnnnnnnnnnnnnnnnnnnnnnnnnnnnnnnnnnnnnnnnnnnnnnnnnnnnnnnnnnnnnnnnnnnnnnnnnnnnnnnnnnnnnnnnnnnnnnnnnnnnnnnnnnnnnnnnnnnnnnnnnnnnnnnnnnnnnnnnnnnnnnnnnnnnnnnnnnnnnnnnnnnnnnnnnnnnnnnnnnnnnnnnnnnnnnnnnnnnnnnnnnnnnnnnnnnnnnnnnnnnnnnnnnnnnnnnnnnnnnnnnnnnnnnnnnnnnnnnnnnnnnnnnnnnnnnnnnnnnnnnnnnnnnnnnnnnnnnnnnnnnnnnnnnnnnnnnnnnnnnnnnnnnnnnnnnnnnnnnnnnnnnnnnnnnnnnnnnnnnnnnnnnnnnnnnnnnnnnnnnnnnnnnnnnnnnnnnnnnnnnnnnnnnnnnnnnnnnnnnnnnnnnnnnnnnnnnnnnnnnnnnnnnnnnnnnnnnnnnnnnnnnnnnnnnnnnnnnnnnnnnnnnnnnnnnnnnnnnnnnnnnnnnnnnnnnnnnnnnnnnnnnnnnnnnnnnnnnnnnnnnnnnnnnnnnnnnnnnnnnnnnnnnnnnnnnnnnnnnnnnnnnnnnnnnnnnnnnnnnnnnnnnnnnnnnnnnnnnnnnnnnnnnnnnnnnnnnnnnnnnnnnnnnnnnnnnnnnnnnnnnnnnnnnnnnnnnnnnnnnnnnnnnnnnnnnnnnnnnnnnnnnnnnnnnnnnnnnnnnnnnnnnnnnnnnnnnnnnnnnnnnnnnnnnnnnnnnnnnnnnnnnnnnnnnnnnnnnnnnnnnnnnnnnnnnnnnnnnnnnnnnnnnnnnnnnnnnnnnnnnnnnnnnnnnnnnnnnnnnnnnnnnnnnnnnnnnnnnnnnnnnnnnnnnnnnnnnnnnnnnnnnnnnnnnnnnnnnnnnnnnnnnnnnnnnnnnnnnnnnnnnnnnnnnnnnnnnnnnnnnnnnnnnnnnnnnnnnnnnnnnnnnnnnnnnnnnnnnnnnnnnnnnnnnnnnnnnnnnnnnnnnnnnnnnnnnnnnnnnnnnnnnnnnnnnnnnnnnnnnnnnnnnnnnnnnnnnnnnnnnnnnnnnnnnnnnnnnnnnnnnnnnnnnnnnnnnnnnnnnnnnnnnnnnnnnnnnnnnnnnnnnnnnnnnnnnnnnnnnnnnnnnnnnnnnnnnnnnnnnnnnnnnnnnnnnnnnnnnnnnnnnnnnnnnnnnnnnnnnnnnnnnnnnnnnnnnnnnnnnnnnnnnnnnnnnnnnnnnnnnnnnnnnnnnnnnnnnnnnnnnnnnnnnnnnnnnnnnnnnnnnnnnnnnnnnnnnnnnnnnnnnnnnnnnnnnnnnnnnnnnnnnnnnnnnnnnnnnnnnnnnnnnnnnnnnnnnnnnnnnnnnnnnnnnnnnnnnnnnnnnnnnnnnnnnnnnnnnnnnnnnnnnnnnnnnnnnnnnnnnnnnnnnnnnnnnnnnnnnnnnnnnnnnnnnnnnnnnnnnnnnnnnnnnnnnnnnnnnnnnnnnnnnnnnnnnnnnnnnnnnnnnnnnnnnnnnnnnnnnnnnnnnnnnnnnnnnnnnnnnnnnnnnnnnnnnnnnnnnnnnnnnnnnnnnnnnnnnnnnnnnnnnnnnnnnnnnnnnnnnnnnnnnnnnnnnnnnnnnnnnnnnnnnnnnnnnnnnnnnnnnnnnnnnnnnnnnnnnnnnnnnnnnnnnnnnnnnnnnnnnnnnnnnnnnnnnnnnnnnnnnnnnnnnnnnnnnnnnnnnnnnnnnnnnnnnnnnnnnnnnnnnnnnnnnnnnnnnnnnnnnnnnnnnnnnnnnnnnnnnnnnnnnnnnnnnnnnnnnnnnnnnnnnnnnnnnnnnnnnnnnnnnnnnnnnnnnnnnnnnnnnnnnnnnnnnnnnnnnnnnnnnnnnnnnnnnnnnnnnnnnnnnnnnnnnnnnnnnnnnnnnnnnnnnnnnnnnnnnnnnnnnnnnnnnnnnnnnnnnnnnnnnnnnnnnnnnnnnnnnnnnnnnnnnnnnnnnnnnnnnnnnnnnnnnnnnnnnnnnnnnnnnnnnnnnnnnnnnnnnnnnnnnnnnnnnnnnnnnnnnnnnnnnnnnnnnnnnnnnnnnnnnnnnnnnnnnnnnnnnnnnnnnnnnnnnnnnnnnnnnnnnnnnnnnnnnnnnnnnnnnnnnnnnnnnnnnnnnnnnnnnnnnnnnnnnnnnnnnnnnnnnnnnnnnnnnnnnnnnnnnnnnnnnnnnnnnnnnnnnnnnnnnnnnnnnnnnnnnnnnnnnnnnnnnnnnnnnnnnnnnnnnnnnnnnnnnnnnnnnnnnnnnnnnnnnnnnnnnnnnnnnnnnnnnnnnnnnnnnnnnnnnnnnnnnnnnnnnnnnnnnnnnnnnnnnnnnnnnnnnnnnnnnnnnnnnnnnnnnnnnnnnnnnnnnnnnnnnnnnnnnnnnnnnnnnnnnnnnnnnnnnnnnnnnnnnnnnnnnnnnnnnnnnnnnnnnnnnnnnnnnnnnnnnnnnnnnnnnnnnnnnnnnnnnnnnnnnnnnnnnnnnnnnnnnnnnnnnnnnnnnnnnnnnnnnnnnnnnnnnnnnnnnnnnnnnnnnnnnnnnnnnnnnnnnnnnnnnnnnnnnnnnnnnnnnnnnnnnnnnnnnnnnnnnnnnnnnnnnnnnnnnnnnnnnnnnnnnnnnnnnnnnnnnnnnnnnnnnnnnnnnnnnnnnnnnnnnnnnnnnnnnnnnnnnnnnnnnnnnnnnnnnnnnnnnnnnnnnnnnnnnnnnnnnnnnnnnnnnnnnnnnnnnnnnnnnnnnnnnnnnnnnnnnnnnnnnnnnnnnnnnnnnnnnnnnnnnnnnnnnnnnnnnnnnnnnnnnnnnnnnnnnnnnnnnnnnnnnnnnnnnnnnnnnnnnnnnnnnnnnnnnnnnnnnnnnnnnnnnnnnnnnnnnnnnnnnnnnnnnnnnnnnnnnnnnnnnnnnnnnnnnnnnnnnnnnnnnnnnnnnnnnnnnnnnnnnnnnnnnnnnnnnnnnnnnnnnnnnnnnnnnnnnnnnnnnnnnnnnnnnnnnnnnnnnnnnnnnnnnnnnnnnnnnnnnnnnnnnnnnnnnnnnnnnnnnnnnnnnnnnnnnnnnnnnnnnnnnnnnnnnnnnnnnnnnnnnnnnnnnnnnnnnnnnnnnnnnnnnnnnnnnnnnnnnnnnnnnnnnnnnnnnnnnnnnnnnnnnnnnnnnnnnnnnnnnnnnnnnnnnnnnnnnnnnnnnnnnnnnnnnnnnnnnnnnnnnnnnnnnnnnnnnnnnnnnnnnnnnnnnnnnnnnnnnnnnnnnnnnnnnnnnnnnnnnnnnnnnnnnnnnnnnnnnnnnnnnnnnnnnnnnnnnnnnnnnnnnnnnnnnnnnnnnnnnnnnnnnnnnnnnnnnnnnnnnnnnnnnnnnnnnnnnnnnnnnnnnnnnnnnnnnnnnnnnnnnnnnnnnnnnnnnnnnnnnnnnnnnnnnnnnnnnnnnnnnnnnnnnnnnnnnnnnnnnnnnnnnnnnnnnnnnnnnnnnnnnnnnnnnnnnnnnnnnnnnnnnnnnnnnnnnnnnnnnnnnnnnnnnnnnnnnnnnnnnnnnnnnnnnnnnnnnnnnnnnnnnnnnnnnnnnnnnnnnnnnnnnnnnnnnnnnnnnnnnnnnnnnnnnnnnnnnnnnnnnnnnnnnnnnnnnnnnnnnnnnnnnnnnnnnnnnnnnnnnnnnnnnnnnnnnnnnnnnnnnnnnnnnnnnnnnnnnnnnnnnnnnnnnnnnnnnnnnnnnnnnnnnnnnnnnnnnnnnnnnnnnnnnnnnnnnnnnnnnnnnnnnnnnnnnnnnnnnnnnnnnnnnnnnnnnnnnnnnnnnnnnnnnnnnnnnnnnnnnnnnnnnnnnnnnnnnnnnnnnnnnnnnnnnnnnnnnnnnnnnnnnnnnnnnnnnnnnnnnnnnnnnnnnnnnnnnnnnnnnnnnnnnnnnnnnnnnnnnnnnnnnnnnnnnnnnnnnnnnnnnnnnnnnnnnnnnnnnnnnnnnnnnnnnnnnnnnnnnnnnnnnnnnnnnnnnnnnnnnnnnnnnnnnnnnnnnnnnnnnnnnnnnnnnnnnnnnnnnnnnnnnnnnnnnnnnnnnnnnnnnnnnnnnnnnnnnnnnnnnnnnnnnnnnnnnnnnnnnnnnnnnnnnnnnnnnnnnnnnnnnnnnnnnnnnnnnnnnnnnnnnnnnnnnnnnnnnnnnnnnnnnnnnnnnnnnnnnnnnnnnnnnnnnnnnnnnnnnnnnnnnnnnnnnnnnnnnnnnnnnnnnnnnnnnnnnnnnnnnnnnnnnnnnnnnnnnnnnnnnnnnnnnnnnnnnnnnnnnnnnnnnnnnnnnnnnnnnnnnnnnnnnnnnnnnnnnnnnnnnnnnnnnnnnnnnnnnnnnnnnnnnnnnnnnnnnnnnnnnnnnnnnnnnnnnnnnnnnnnnnnnnnnnnnnnnnnnnnnnnnnnnnnnnnnnnnnnnnnnnnnnnnnnnnnnnnnnnnnnnnnnnnnnnnnnnnnnnnnnnnnnnnnnnnnnnnnnnnnnnnnnnnnnnnnnnnnnnnnnnnnnnnnnnnnnnnnnnnnnnnnnnnnnnnnnnnnnnnnnnnnnnnnnnnnnnnnnnnnnnnnnnnnnnnnnnnnnnnnnnnnnnnnnnnnnnnnnnnnnnnnnnnnnnnnnnnnnnnnnnnnnnnnnnnnnnnnnnnnnnnnnnnnnnnnnnnnnnnnnnnnnnnnnnnnnnnnnnnnnnnnnnnnnnnnnnnnnnnnnnnnnnnnnnnnnnnnnnnnnnnnnnnnnnnnnnnnnnnnnnnnnnnnnnnnnnnnnnnnnnnnnnnnnnnnnnnnnnnnnnnnnnnnnnnnnnnnnnnnnnnnnnnnnnnnnnnnnnnnnnnnnnnnnnnnnnnnnnnnnnnnnnnnnnnnnnnnnnnnnnnnnnnnnnnnnnnnnnnnnnnnnnnnnnnnnnnnnnnnnnnnnnnnnnnnnnnnnnnnnnnnnnnnnnnnnnnnnnnnnnnnnnnnnnnnnnnnnnnnnnnnnnnnnnnnnnnnnnnnnnnnnnnnnnnnnnnnnnnnnnnnnnnnnnnnnnnnnnnnnnnnnnnnnnnnnnnnnnnnnnnnnnnnnnnnnnnnnnnnnnnnnnnnnnnnnnnnnnnnnnnnnnnnnnnnnnnnnnnnnnnnnnnnnnnnnnnnnnnnnnnnnnnnnnnnnnnnnnnnnnnnnnnnnnnnnnnnnnnnnnnnnnnnnnnnnnnnnnnnnnnnnnnnnnnnnnnnnnnnnnnnnnnnnnnnnnnnnnnnnnnnnnnnnnnnnnnnnnnnnnnnnnnnnnnnnnnnnnnnnnnnnnnnnnnnnnnnnnnnnnnnnnnnnnnnnnnnnnnnnnnnnnnnnnnnnnnnnnnnnnnnnnnnnnnnnnnnnnnnnnnnnnnnnnnnnnnnnnnnnnnnnnnnnnnnnnnnnnnnnnnnnnnnnnnnnnnnnnnnnnnnnnnnnnnnnnnnnnnnnnnnnnnnnnnnnnnnnnnnnnnnnnnnnnnnnnnnnnnnnnnnnnnnnnnnnnnnnnnnnnnnnnnnnnnnnnnnnnnnnnnnnnnnnnnnnnnnnnnnnnnnnnnnnnnnnnnnnnnnnnnnnnnnnnnnnnnnnnnnnnnnnnnnnnnnnnnnnnnnnnnnnnnnnnnnnnnnnnnnnnnnnnnnnnnnnnnnnnnnnnnnnnnnnnnnnnnnnnnnnnnnnnnnnnnnnnnnnnnnnnnnnnnnnnnnnnnnnnnnnnnnnnnnnnnnnnnnnnnnnnnnnnnnnnnnnnnnnnnnnnnnnnnnnnnnnnnnnnnnnnnnnnnnnnnnnnnnnnnnnnnnnnnnnnnnnnnnnnnnnnnnnnnnnnnnnnnnnnnnnnnnnnnnnnnnnnnnnnnnnnnnnnnnnnnnnnnnnnnnnnnnnnnnnnnnnnnnnnnnnnnnnnnnnnnnnnnnnnnnnnnnnnnnnnnnnnnnnnnnnnnnnnnnnnnnnnnnnnnnnnnnnnnnnnnnnnnnnnnnnnnnnnnnnnnnnnnnnnnnnnnnnnnnnnnnnnnnnnnnnnnnnnnnnnnnnnnnnnnnnnnnnnnnnnnnnnnnnnnnnnnnnnnnnnnnnnnnnnnnnnnnnnnnnnnnnnnnnnnnnnnnnnnnnnnnnnnnnnnnnnnnnnnnnnnnnnnnnnnnnnnnnnnnnnnnnnnnnnnnnnnnnnnnnnnnnnnnnnnnnnnnnnnnnnnnnnnnnnnnnnnnnnnnnnnnnnnnnnnnnnnnnnnnnnnnnnnnnnnnnnnnnnnnnnnnnnnnnnnnnnnnnnnnnnnnnnnnnnnnnnnnnnnnnnnnnnnnnnnnnnnnnnnnnnnnnnnnnnnnnnnnnnnnnnnnnnnnnnnnnnnnnnnnnnnnnnnnnnnnnnnnnnnnnnnnnnnnnnnnnnnnnnnnnnnnnnnnnnnnnnnnnnnnnnnnnnnnnnnnnnnnnnnnnnnnnnnnnnnnnnnnnnnnnnnnnnnnnnnnnnnnnnnnnnnnnnnnnnnnnnnnnnnnnnnnnnnnnnnnnnnnnnnnnnnnnnnnnnnnnnnnnnnnnnnnnnnnnnnnnnnnnnnnnnnnnnnnnnnnnnnnnnnnnnnnnnnnnnnnnnnnnnnnnnnnnnnnnnnnnnnnnnnnnnnnnnnnnnnnnnnnnnnnnnnnnnnnnnnnnnnnnnnnnnnnnnnnnnnnnnnnnnnnnnnnnnnnnnnnnnnnnnnnnnnnnnnnnnnnnnnnnnnnnnnnnnnnnnnnnnnnnnnnnnnnnnnnnnnnnnnnnnnnnnnnnnnnnnnnnnnnnnnnnnnnnnnnnnnnnnnnnnnnnnnnnnnnnnnnnnnnnnnnnnnnnnnnnnnnnnnnnnnnnnnnnnnnnnnnnnnnnnnnnnnnnnnnnnnnnnnnnnnnnnnnnnnnnnnnnnnnnnnnnnnnnnnnnnnnnnnnnnnnnnnnnnnnnnnnnnnnnnnnnnnnnnnnnnnnnnnnnnnnnnnnnnnnnnnnnnnnnnnnnnnnnnnnnnnnnnnnnnnnnnnnnnnnnnnnnnnnnnnnnnnnnnnnnnnnnnnnnnnnnnnnnnnnnnnnnnnnnnnnnnnnnnnnnnnnnnnnnnnnnnnnnnnnnnnnnnnnnnnnnnnnnnnnnnnnnnnnnnnnnnnnnnnnnnnnnnnnnnnnnnnnnnnnnnnnnnnnnnnnnnnnnnnnnnnnnnnnnnnnnnnnnnnnnnnnnnnnnnnnnnnnnnnnnnnnnnnnnnnnnnnnnnnnnnnnnnnnnnnnnnnnnnnnnnnnnnnnnnnnnnnnnnnnnnnnnnnnnnnnnnnnnnnnnnnnnnnnnnnnnnnnnnnnnnnnnnnnnnnnnnnnnnnnnnnnnnnnnnnnnnnnnnnnnnnnnnnnnnnnnnnnnnnnnnnnnnnnnnnnnnnnnnnnnnnnnnnnnnnnnnnnnnnnnnnnnnnnnnnnnnnnnnnnnnnnnnnnnnnnnnnnnnnnnnnnnnnnnnnnnnnnnnnnnnnnnnnnnnnnnnnnnnnnnnnnnnnnnnnnnnnnnnnnnnnnnnnnnnnnnnnnnnnnnnnnnnnnnnnnnnnnnnnnnnnnnnnnnnnnnnnnnnnnnnnnnnnnnnnnnnnnnnnnnnnnnnnnnnnnnnnnnnnnnnnnnnnnnnnnnnnnnnnnnnnnnnnnnnnnnnnnnnnnnnnnnnnnnnnnnnnnnnnnnnnnnnnnnnnnnnnnnnnnnnnnnnnnnnnnnnnnnnnnnnnnnnnnnnnnnnnnnnnnnnnnnnnnnnnnnnnnnnnnnnnnnnnnnnnnnnnnnnnnnnnnnnnnnnnnnnnnnnnnnnnnnnnnnnnnnnnnnnnnnnnnnnnnnnnnnnnnnnnnnnnnnnnnnnnnnnnnnnnnnnnnnnnnnnnnnnnnnnnnnnnnnnnnnnnnnnnnnnnnnnnnnnnnnnnnnnnnnnnnnnnnnnnnnnnnnnnnnnnnnnnnnnnnnnnnnnnnnnnnnnnnnnnnnnnnnnnnnnnnnnnnnnnnnnnnnnnnnnnnnnnnnnnnnnnnnnnnnnnnnnnnnnnnnnnnnnnnnnnnnnnnnnnnnnnnnnnnnnnnnnnnnnnnnnnnnnnnnnnnnnnnnnnnnnnnnnnnnnnnnnnnnnnnnnnnnnnnnnnnnnnnnnnnnnnnnnnnnnnnnnnnnnnnnnnnnnnnnnnnnnnnnnnnnnnnnnnnnnnnnnnnnnnnnnnnnnnnnnnnnnnnnnnnnnnnnnnnnnnnnnnnnnnnnnnnnnnnnnnnnnnnnnnnnnnnnnnnnnnnnnnnnnnnnnnnnnnnnnnnnnnnnnnnnnnnnnnnnnnnnnnnnnnnnnnnnnnnnnnnnnnnnnnnnnnnnnnnnnnnnnnnnnnnnnnnnnnnnnnnnnnnnnnnnnnnnnnnnnnnnnnnnnnnnnnnnnnnnnnnnnnnnnnnnnnnnnnnnnnnnnnnnnnnnnnnnnnnnnnnnnnnnnnnnnnnnnnnnnnnnnnnnnnnnnnnnnnnnnnnnnnnnnnnnnnnnnnnnnnnnnnnnnnnnnnnnnnnnnnnnnnnnnnnnnnnnnnnnnnnnnnnnnnnnnnnnnnnnnnnnnnnnnnnnnnnnnnnnnnnnnnnnnnnnnnnnnnnnnnnnnnnnnnnnnnnnnnnnnnnnnnnnnnnnnnnnnnnnnnnnnnnnnnnnnnnnnnnnnnnnnnnnnnnnnnnnnnnnnnnnnnnnnnnnnnnnnnnnnnnnnnnnnnnnnnnnnnnnnnnnnnnnnnnnnnnnnnnnnnnnnnnnnnnnnnnnnnnnnnnnnnnnnnnnnnnnnnnnnnnnnnnnnnnnnnnnnnnnnnnnnnnnnnnnnnnnnnnnnnnnnnnnnnnnnnnnnnnnnnnnnnnnnnnnnnnnnnnnnnnnnnnnnnnnnnnnnnnnnnnnnnnnnnnnnnnnnnnnnnnnnnnnnnnnnnnnnnnnnnnnnnnnnnnnnnnnnnnnnnnnnnnnnnnnnnnnnnnnnnnnnnnnnnnnnnnnnnnnnnnnnnnnnnnnnnnnnnnnnnnnnnnnnnnnnnnnnnnnnnnnnnnnnnnnnnnnnnnnnnnnnnnnnnnnnnnnnnnnnnnnnnnnnnnnnnnnnnnnnnnnnnnnnnnnnnnnnnnnnnnnnnnnnnnnnnnnnnnnnnnnnnnnnnnnnnnnnnnnnnnnnnnnnnnnnnnnnnnnnnnnnnnnnnnnnnnnnnnnnnnnnnnnnnnnnnnnnnnnnnnnnnnnnnnnnnnnnnnnnnnnnnnnnnnnnnnnnnnnnnnnnnnnnnnnnnnnnnnnnnnnnnnnnnnnnnnnnnnnnnnnnnnnnnnnnnnnnnnnnnnnnnnnnnnnnnnnnnnnnnnnnnnnnnnnnnnnnnnnnnnnnnnnnnnnnnnnnnnnnnnnnnnnnnnnnnnnnnnnnnnnnnnnnnnnnnnnnnnnnnnnnnnnnnnnnnnnnnnnnnnnnnnnnnnnnnnnnnnnnnnnnnnnnnnnnnnnnnnnnnnnnnnnnnnnnnnnnnnnnnnnnnnnnnnnnnnnnnnnnnnnnnnnnnnnnnnnnnnnnnnnnnnnnnnnnnnnnnnnnnnnnnnnnnnnnnnnnnnnnnnnnnnnnnnnnnnnnnnnnnnnnnnnnnnnnnnnnnnnnnnnnnnnnnnnnnnnnnnnnnnnnnnnnnnnnnnnnnnnnnnnnnnnnnnnnnnnnnnnnnnnnnnnnnnnnnnnnnnnnnnnnnnnnnnnnnnnnnnnnnnnnnnnnnnnnnnnnnnnnnnnnnnnnnnnnnnnnnnnnnnnnnnnnnnnnnnnnnnnnnnnnnnnnnnnnnnnnnnnnnnnnnnnnnnnnnnnnnnnnnnnnnnnnnnnnnnnnnnnnnnnnnnnnnnnnnnnnnnnnnnnnnnnnnnnnnnnnnnnnnnnnnnnnnnnnnnnnnnnnnnnnnnnnnnnnnnnnnnnnnnnnnnnnnnnnnnnnnnnnnnnnnnnnnnnnnnnnnnnnnnnnnnnnnnnnnnnnnnnnnnnnnnnnnnnnnnnnnnnnnnnnnnnnnnnnnnnnnnnnnnnnnnnnnnnnnnnnnnnnnnnnnnnnnnnnnnnnnnnnnnnnnnnnnnnnnnnnnnnnnnnnnnnnnnnnnnnnnnnnnnnnnnnnnnnnnnnnnnnnnnnnnnnnnnnnnnnnnnnnnnnnnnnnnnnnnnnnnnnnnnnnnnnnnnnnnnnnnnnnnnnnnnnnnnnnnnnnnnnnnnnnnnnnnnnnnnnnnnnnnnnnnnnnnnnnnnnnnnnnnnnnnnnnnnnnnnnnnnnnnnnnnnnnnnnnnnnnnnnnnnnnnnnnnnnnnnnnnnnnnnnnnnnnnnnnnnnnnnnnnnnnnnnnnnnnnnnnnnnnnnnnnnnnnnnnnnnnnnnnnnnnnnnnnnnnnnnnnnnnnnnnnnnnnnnnnnnnnnnnnnnnnnnnnnnnnnnnnnnnnnnnnnnnnnnnnnnnnnnnnnnnnnnnnnnnnnnnnnnnnnnnnnnnnnnnnnnnnnnnnnnnnnnnnnnnnnnnnnnnnnnnnnnnnnnnnnnnnnnnnnnnnnnnnnnnnnnnnnnnnnnnnnnnnnnnnnnnnnnnnnnnnnnnnnnnnnnnnnnnnnnnnnnnnnnnnnnnnnnnnnnnnnnnnnnnnnnnnnnnnnnnnnnnnnnnnnnnnnnnnnnnnnnnnnnnnnnnnnnnnnnnnnnnnnnnnnnnnnnnnnnnnnnnnnnnnnnnnnnnnnnnnnnnnnnnnnnnnnnnnnnnnnnnnnnnnnnnnnnnnnnnnnnnnnnnnnnnnnnnnnnnnnnnnnnnnnnnnnnnnnnnnnnnnnnnnnnnnnnnnnnnnnnnnnnnnnnnnnnnnnnnnnnnnnnnnnnnnnnnnnnnnnnnnnnnnnnnnnnnnnnnnnnnnnnnnnnnnnnnnnnnnnnnnnnnnnnnnnnnnnnnnnnnnnnnnnnnnnnnnnnnnnnnnnnnnnnnnnnnnnnnnnnnnnnnnnnnnnnnnnnnnnnnnnnnnnnnnnnnnnnnnnnnnnnnnnnnnnnnnnnnnnnnnnnnnnnnnnnnnnnnnnnnnnnnnnnnnnnnnnnnnnnnnnnnnnnnnnnnnnnnnnnnnnnnnnnnnnnnnnnnnnnnnnnnnnnnnnnnnnnnnnnnnnnnnnnnnnnnnnnnnnnnnnnnnnnnnnnnnnnnnnnnnnnnnnnnnnnnnnnnnnnnnnnnnnnnnnnnnnnnnnnnnnnnnnnnnnnnnnnnnnnnnnnnnnnnnnnnnnnnnnnnnnnnnnnnnnnnnnnnnnnnnnnnnnnnnnnnnnnnnnnnnnnnnnnnnnnnnnnnnnnnnnnnnnnnnnnnnnnnnnnnnnnnnnnnnnnnnnnnnnnnnnnnnnnnnnnnnnnnnnnnnnnnnnnnnnnnnnnnnnnnnnnnnnnnnnnnnnnnnnnnnnnnnnnnnnnnnnnnnnnnnnnnnnnnnnnnnnnnnnnnnnnnnnnnnnnnnnnnnnnnnnnnnnnnnnnnnnnnnnnnnnnnnnnnnnnnnnnnnnnnnnnnnnnnnnnnnnnnnnnnnnnnnnnnnnnnnnnnnnnnnnnnnnnnnnnnnnnnnnnnnnnnnnnnnnnnnnnnnnnnnnnnnnnnnnnnnnnnnnnnnnnnnnnnnnnnnnnnnnnnnnnnnnnnnnnnnnnnnnnnnnnnnnnnnnnnnnnnnnnnnnnnnnnnnnnnnnnnnnnnnnnnnnnnnnnnnnnnnnnnnnnnnnnnnnnnnnnnnnnnnnnnnnnnnnnnnnnnnnnnnnnnnnnnnnnnnnnnnnnnnnnnnnnnnnnnnnnnnnnnnnnnnnnnnnnnnnnnnnnnnnnnnnnnnnnnnnnnnnnnnnnnnnnnnnnnnnnnnnnnnnnnnnnnnnnnnnnnnnnnnnnnnnnnnnnnnnnnnnnnnnnnnnnnnnnnnnnnnnnnnnnnnnnnnnnnnnnnnnnnnnnnnnnnnnnnnnnnnnnnnnnnnnnnnnnnnnnnnnnnnnnnnnnnnnnnnnnnnnnnnnnnnnnnnnnnnnnnnnnnnnnnnnnnnnnnnnnnnnnnnnnnnnnnnnnnnnnnnnnnnnnnnnnnnnnnnnnnnnnnnnnnnnnnnnnnnnnnnnnnnnnnnnnnnnnnnnnnnnnnnnnnnnnnnnnnnnnnnnnnnnnnnnnnnnnnnnnnnnnnnnnnnnnnnnnnnnnnnnnnnnnnnnnnnnnnnnnnnnnnnnnnnnnnnnnnnnnnnnnnnnnnnnnnnnnnnnnnnnnnnnnnnnnnnnnnnnnnnnnnnnnnnnnnnnnnnnnnnnnnnnnnnnnnnnnnnnnnnnnnnnnnnnnnnnnnnnnnnnnnnnnnnnnnnnnnnnnnnnnnnnnnnnnnnnnnnnnnnnnnnnnnnnnnnnnnnnnnnnnnnnnnnnnnnnnnnnnnnnnnnnnnnnnnnnnnnnnnnnnnnnnnnnnnnnnnnnnnnnnnnnnnnnnnnnnnnnnnnnnnnnnnnnnnnnnnnnnnnnnnnnnnnnnnnnnnnnnnnnnnnnnnnnnnnnnnnnnnnnnnnnnnnnnnnnnnnnnnnnnnnnnnnnnnnnnnnnnnnnnnnnnnnnnnnnnnnnnnnnnnnnnnnnnnnnnnnnnnnnnnnnnnnnnnnnnnnnnnnnnnnnnnnnnnnnnnnnnnnnnnnnnnnnnnnnnnnnnnnnnnnnnnnnnnnnnnnnnnnnnnnnnnnnnnnnnnnnnnnnnnnnnnnnnnnnnnnnnnnnnnnnnnnnnnnnnnnnnnnnnnnnnnnnnnnnnnnnnnnnnnnnnnnnnnnnnnnnnnnnnnnnnnnnnnnnnnnnnnnnnnnnnnnnnnnnnnnnnnnnnnnnnnnnnnnnnnnnnnnnnnnnnnnnnnnnnnnnnnnnnnnnnnnnnnnnnnnnnnnnnnnnnnnnnnnnnnnnnnnnnnnnnnnnnnnnnnnnnnnnnnnnnnnnnnnnnnnnnnnnnnnnnnnnnnnnnnnnnnnnnnnnnnnnnnnnnnnnnnnnnnnnnnnnnnnnnnnnnnnnnnnnnnnnnnnnnnnnnnnnnnnnnnnnnnnnnnnnnnnnnnnnnnnnnnnnnnnnnnnnnnnnnnnnnnnnnnnnnnnnnnnnnnnnnnnnnnnnnnnnnnnnnnnnnnnnnnnnnnnnnnnnnnnnnnnnnnnnnnnnnnnnnnnnnnnnnnnnnnnnnnnnnnnnnnnnnnnnnnnnnnnnnnnnnnnnnnnnnnnnnnnnnnnnnnnnnnnnnnnnnnnnnnnnnnnnnnnnnnnnnnnnnnnnnnnnnnnnnnnnnnnnnnnnnnnnnnnnnnnnnnnnnnnnnnnnnnnnnnnnnnnnnnnnnnnnnnnnnnnnnnnnnnnnnnnnnnnnnnnnnnnnnnnnnnnnnnnnnnnnnnnnnnnnnnnnnnnnnnnnnnnnnnnnnnnnnnnnnnnnnnnnnnnnnnnnnnnnnnnnnnnnnnnnnnnnnnnnnnnnnnnnnnnnnnnnnnnnnnnnnnnnnnnnnnnnnnnnnnnnnnnnnnnnnnnnnnnnnnnnnnnnnnnnnnnnnnnnnnnnnnnnnnnnnnnnnnnnnnnnnnnnnnnnnnnnnnnnnnnnnnnnnnnnnnnnnnnnnnnnnnnnnnnnnnnnnnnnnnnnnnnnnnnnnnnnnnnnnnnnnnnnnnnnnnnnnnnnnnnnnnnnnnnnnnnnnnnnnnnnnnnnnnnnnnnnnnnnnnnnnnnnnnnnnnnnnnnnnnnnnnnnnnnnnnnnnnnnnnnnnnnnnnnnnnnnnnnnnnnnnnnnnnnnnnnnnnnnnnnnnnnnnnnnnnnnnnnnnnnnnnnnnnnnnnnnnnnnnnnnnnnnnnnnnnnnnnnnnnnnnnnnnnnnnnnnnnnnnnnnnnnnnnnnnnnnnnnnnnnnnnnnnnnnnnnnnnnnnnnnnnnnnnnnnnnnnnnnnnnnnnnnnnnnnnnnnnnnnnnnnnnnnnnnnnnnnnnnnnnnnnnnnnnnnnnnnnnnnnnnnnnnnnnnnnnnnnnnnnnnnnnnnnnnnnnnnnnnnnnnnnnnnnnnnnnnnnnnnnnnnnnnnnnnnnnnnnnnnnnnnnnnnnnnnnnnnnnnnnnnnnnnnnnnnnnnnnnnnnnnnnnnnnnnnnnnnnnnnnnnnnnnnnnnnnnnnnnnnnnnnnnnnnnnnnnnnnnnnnnnnnnnnnnnnnnnnnnnnnnnnnnnnnnnnnnnnnnnnnnnnnnnnnnnnnnnnnnnnnnnnnnnnnnnnnnnnnnnnnnnnnnnnnnnnnnnnnnnnnnnnnnnnnnnnnnnnnnnnnnnnnnnnnnnnnnnnnnnnnnnnnnnnnnnnnnnnnnnnnnnnnnnnnnnnnnnnnnnnnnnnnnnnnnnnnnnnnnnnnnnnnnnnnnnnnnnnnnnnnnnnnnnnnnnnnnnnnnnnnnnnnnnnnnnnnnnnnnnnnnnnnnnnnnnnnnnnnnnnnnnnnnnnnnnnnnnnnnnnnnnnnnnnnnnnnnnnnnnnnnnnnnnnnnnnnnnnnnnnnnnnnnnnnnnnnnnnnnnnnnnnnnnnnnnnnnnnnnnnnnnnnnnnnnnnnnnnnnnnnnnnnnnnnnnnnnnnnnnnnnnnnnnnnnnnnnnnnnnnnnnnnnnnnnnnnnnnnnnnnnnnnnnnnnnnnnnnnnnnnnnnnnnnnnnnnnnnnnnnnnnnnnnnnnnnnnnnnnnnnnnnnnnnnnnnnnnnnnnnnnnnnnnnnnnnnnnnnnnnnnnnnnnnnnnnnnnnnnnnnnnnnnnnnnnnnnnnnnnnnnnnnnnnnnnnnnnnnnnnnnnnnnnnnnnnnnnnnnnnnnnnnnnnnnnnnnnnnnnnnnnnnnnnnnnnnnnnnnnnnnnnnnnnnnnnnnnnnnnnnnnnnnnnnnnnnnnnnnnnnnnnnnnnnnnnnnnnnnnnnnnnnnnnnnnnnnnnnnnnnnnnnnnnnnnnnnnnnnnnnnnnnnnnnnnnnnnnnnnnnnnnnnnnnnnnnnnnnnnnnnnnnnnnnnnnnnnnnnnnnnnnnnnnnnnnnnnnnnnnnnnnnnnnnnnnnnnnnnnnnnnnnnnnnnnnnnnnnnnnnnnnnnnnnnnnnnnnnnnnnnnnnnnnnnnnnnnnnnnnnnnnnnnnnnnnnnnnnnnnnnnnnnnnnnnnnnnnnnnnnnnnnnnnnnnnnnnnnnnnnnnnnnnnnnnnnnnnnnnnnnnnnnnnnnnnnnnnnnnnnnnnnnnnnnnnnnnnnnnnnnnnnnnnnnnnnnnnnnnnnnnnnnnnnnnnnnnnnnnnnnnnnnnnnnnnnnnnnnnnnnnnnnnnnnnnnnnnnnnnnnnnnnnnnnnnnnnnnnnnnnnnnnnnnnnnnnnnnnnnnnnnnnnnnnnnnnnnnnnnnnnnnnnnnnnnnnnnnnnnnnnnnnnnnnnnnnnnnnnnnnnnnnnnnnnnnnnnnnnnnnnnnnnnnnnnnnnnnnnnnnnnnnnnnnnnnnnnnnnnnnnnnnnnnnnnnnnnnnnnnnnnnnnnnnnnnnnnnnnnnnnnnnnnnnnnnnnnnnnnnnnnnnnnnnnnnnnnnnnnnnnnnnnnnnnnnnnnnnnnnnnnnnnnnnnnnnnnnnnnnnnnnnnnnnnnnnnnnnnnnnnnnnnnnnnnnnnnnnnnnnnnnnnnnnnnnnnnnnnnnnnnnnnnnnnnnnnnnnnnnnnnnnnnnnnnnnnnnnnnnnnnnnnnnnnnnnnnnnnnnnnnnnnnnnnnnnnnnnnnnnnnnnnnnnnnnnnnnnnnnnnnnnnnnnnnnnnnnnnnnnnnnnnnnnnnnnnnnnnnnnnnnnnnnnnnnnnnnnnnnnnnnnnnnnnnnnnnnnnnnnnnnnnnnnnnnnnnnnnnnnnnnnnnnnnnnnnnnnnnnnnnnnnnnnnnnnnnnnnnnnnnnnnnnnnnnnnnnnnnnnnnnnnnnnnnnnnnnnnnnnnnnnnnnnnnnnnnnnnnnnnnnnnnnnnnnnnnnnnnnnnnnnnnnnnnnnnnnnnnnnnnnnnnnnnnnnnnnnnnnnnnnnnnnnnnnnnnnnnnnnnnnnnnnnnnnnnnnnnnnnnnnnnnnnnnnnnnnnnnnnnnnnnnnnnnnnnnnnnnnnnnnnnnnnnnnnnnnnnnnnnnnnnnnnnnnnnnnnnnnnnnnnnnnnnnnnnnnnnnnnnnnnnnnnnnnnnnnnnnnnnnnnnnnnnnnnnnnnnnnnnnnnnnnnnnnnnnnnnnnnnnnnnnnnnnnnnnnnnnnnnnnnnnnnnnnnnnnnnnnnnnnnnnnnnnnnnnnnnnnnnnnnnnnnnnnnnnnnnnnnnnnnnnnnnnnnnnnnnnnnnnnnnnnnnnnnnnnnnnnnnnnnnnnnnnnnnnnnnnnnnnnnnnnnnnnnnnnnnnnnnnnnnnnnnnnnnnnnnnnnnnnnnnnnnnnnnnnnnnnnnnnnnnnnnnnnnnnnnnnnnnnnnnnnnnnnnnnnnnnnnnnnnnnnnnnnnnnnnnnnnnnnnnnnnnnnnnnnnnnnnnnnnnnnnnnnnnnnnnnnnnnnnnnnnnnnnnnnnnnnnnnnnnnnnnnnnnnnnnnnnnnnnnnnnnnnnnnnnnnnnnnnnnnnnnnnnnnnnnnnnnnnnnnnnnnnnnnnnnnnnnnnnnnnnnnnnnnnnnnnnnnnnnnnnnnnnnnnnnnnnnnnnnnnnnnnnnnnnnnnnnnnnnnnnnnnnnnnnnnnnnnnnnnnnnnnnnnnnnnnnnnnnnnnnnnnnnnnnnnnnnnnnnnnnnnnnnnnnnnnnnnnnnnnnnnnnnnnnnnnnnnnnnnnnnnnnnnnnnnnnnnnnnnnnnnnnnnnnnnnnnnnnnnnnnnnnnnnnnnnnnnnnnnnnnnnnnnnnnnnnnnnnnnnnnnnnnnnnnnnnnnnnnnnnnnnnnnnnnnnnnnnnnnnnnnnnnnnnnnnnnnnnnnnnnnnnnnnnnnnnnnnnnnnnnnnnnnnnnnnnnnnnnnnnnnnnnnnnnnnnnnnnnnnnnnnnnnnnnnnnnnnnnnnnnnnnnnnnnnnnnnnnnnnnnnnnnnnnnnnnnnnnnnnnnnnnnnnnnnnnnnnnnnnnnnnnnnnnnnnnnnnnnnnnnnnnnnnnnnnnnnnnnnnnnnnnnnnnnnnnnnnnnnnnnnnnnnnnnnnnnnnnnnnnnnnnnnnnnnnnnnnnnnnnnnnnnnnnnnnnnnnnnnnnnnnnnnnnnnnnnnnnnnnnnnnnnnnnnnnnnnnnnnnnnnnnnnnnnnnnnnnnnnnnnnnnnnnnnnnnnnnnnnnnnnnnnnnnnnnnnnnnnnnnnnnnnnnnnnnnnnnnnnnnnnnnnnnnnnnnnnnnnnnnnnnnnnnnnnnnnnnnnnnnnnnnnnnnnnnnnnnnnnnnnnnnnnnnnnnnnnnnnnnnnnnnnnnnnnnnnnnnnnnnnnnnnnnnnnnnnnnnnnnnnnnnnnnnnnnnnnnnnnnnnnnnnnnnnnnnnnnnnnnnnnnnnnnnnnnnnnnnnnnnnnnnnnnnnnnnnnnnnnnnnnnnnnnnnnnnnnnnnnnnnnnnnnnnnnnnnnnnnnnnnnnnnnnnnnnnnnnnnnnnnnnnnnnnnnnnnnnnnnnnnnnnnnnnnnnnnnnnnnnnnnnnnnnnnnnnnnnnnnnnnnnnnnnnnnnnnnnnnnnnnnnnnnnnnnnnnnnnnnnnnnnnnnnnnnnnnnnnnnnnnnnnnnnnnnnnnnnnnnnnnnnnnnnnnnnnnnnnnnnnnnnnnnnnnnnnnnnnnnnnnnnnnnnnnnnnnnnnnnnnnnnnnnnnnnnnnnnnnnnnnnnnnnnnnnnnnnnnnnnnnnnnnnnnnnnnnnnnnnnnnnnnnnnnnnnnnnnnnnnnnnnnnnnnnnnnnnnnnnnnnnnnnnnnnnnnnnnnnnnnnnnnnnnnnnnnnnnnnnnnnnnnnnnnnnnnnnnnnnnnnnnnnnnnnnnnnnnnnnnnnnnnnnnnnnnnnnnnnnnnnnnnnnnnnnnnnnnnnnnnnnnnnnnnnnnnnnnnnnnnnnnnnnnnnnnnnnnnnnnnnnnnnnnnnnnnnnnnnnnnnnnnnnnnnnnnnnnnnnnnnnnnnnnnnnnnnnnnnnnnnnnnnnnnnnnnnnnnnnnnnnnnnnnnnnnnnnnnnnnnnnnnnnnnnnnnnnnnnnnnnnnnnnnnnnnnnnnnnnnnnnnnnnnnnnnnnnnnnnnnnnnnnnnnnnnnnnnnnnnnnnnnnnnnnnnnnnnnnnnnnnnnnnnnnnnnnnnnnnnnnnnnnnnnnnnnnnnnnnnnnnnnnnnnnnnnnnnnnnnnnnnnnnnnnnnnnnnnnnnnnnnnnnnnnnnnnnnnnnnnnnnnnnnnnnnnnnnnnnnnnnnnnnnnnnnnnnnnnnnnnnnnnnnnnnnnnnnnnnnnnnnnnnnnnnnnnnnnnnnnnnnnnnnnnnnnnnnnnnnnnnnnnnnnnnnnnnnnnnnnnnnnnnnnnnnnnnnnnnnnnnnnnnnnnnnnnnnnnnnnnnnnnnnnnnnnnnnnnnnnnnnnnnnnnnnnnnnnnnnnnnnnnnnnnnnnnnnnnnnnnnnnnnnnnnnnnnnnnnnnnnnnnnnnnnnnnnnnnnnnnnnnnnnnnnnnnnnnnnnnnnnnnnnnnnnnnnnnnnnnnnnnnnnnnnnnnnnnnnnnnnnnnnnnnnnnnnnnnnnnnnnnnnnnnnnnnnnnnnnnnnnnnnnnnnnnnnnnnnnnnnnnnnnnnnnnnnnnnnnnnnnnnnnnnnnnnnnnnnnnnnnnnnnnnnnnnnnnnnnnnnnnnnnnnnnnnnnnnnnnnnnnnnnnnnnnnnnnnnnnnnnnnnnnnnnnnnnnnnnnnnnnnnnnnnnnnnnnnnnnnnnnnnnnnnnnnnnnnnnnnnnnnnnnnnnnnnnnnnnnnnnnnnnnnnnnnnnnnnnnnnnnnnnnnnnnnnnnnnnnnnnnnnnnnnnnnnnnnnnnnnnnnnnnnnnnnnnnnnnnnnnnnnnnnnnnnnnnnnnnnnnnnnnnnnnnnnnnnnnnnnnnnnnnnnnnnnnnnnnnnnnnnnnnnnnnnnnnnnnnnnnnnnnnnnnnnnnnnnnnnnnnnnnnnnnnnnnnnnnnnnnnnnnnnnnnnnnnnnnnnnnnnnnnnnnnnnnnnnnnnnnnnnnnnnnnnnnnnnnnnnnnnnnnnnnnnnnnnnnnnnnnnnnnnnnnnnnnnnnnnnnnnnnnnnnnnnnnnnnnnnnnnnnnnnnnnnnnnnnnnnnnnnnnnnnnnnnnnnnnnnnnnnnnnnnnnnnnnnnnnnnnnnnnnnnnnnnnnnnnnnnnnnnnnnnnnnnnnnnnnnnnnnnnnnnnnnnnnnnnnnnnnnnnnnnnnnnnnnnnnnnnnnnnnnnnnnnnnnnnnnnnnnnnnnnnnnnnnnnnnnnnnnnnnnnnnnnnnnnnnnnnnnnnnnnnnnnnnnnnnnnnnnnnnnnnnnnnnnnnnnnnnnnnnnnnnnnnnnnnnnnnnnnnnnnnnnnnnnnnnnnnnnnnnnnnnnnnnnnnnnnnnnnnnnnnnnnnnnnnnnnnnnnnnnnnnnnnnnnnnnnnnnnnnnnnnnnnnnnnnnnnnnnnnnnnnnnnnnnnnnnnnnnnnnnnnnnnnnnnnnnnnnnnnnnnnnnnnnnnnnnnnnnnnnnnnnnnnnnnnnnnnnnnnnnnnnnnnnnnnnnnnnnnnnnnnnnnnnnnnnnnnnnnnnnnnnnnnnnnnnnnnnnnnnnnnnnnnnnnnnnnnnnnnnnnnnnnnnnnnnnnnnnnnnnnnnnnnnnnnnnnnnnnnnnnnnnnnnnnnnnnnnnnnnnnnnnnnnnnnnnnnnnnnnnnnnnnnnnnnnnnnnnnnnnnnnnnnnnnnnnnnnnnnnnnnnnnnnnnnnnnnnnnnnnnnnnnnnnnnnnnnnnnnnnnnnnnnnnnnnnnnnnnnnnnnnnnnnnnnnnnnnnnnnnnnnnnnnnnnnnnnnnnnnnnnnnnnnnnnnnnnnnnnnnnnnnnnnnnnnnnnnnnnnnnnnnnnnnnnnnnnnnnnnnnnnnnnnnnnnnnnnnnnnnnnnnnnnnnnnnnnnnnnnnnnnnnnnnnnnnnnnnnnnnnnnnnnnnnnnnnnnnnnnnnnnnnnnnnnnnnnnnnnnnnnnnnnnnnnnnnnnnnnnnnnnnnnnnnnnnnnnnnnnnnnnnnnnnnnnnnnnnnnnnnnnnnnnnnnnnnnnnnnnnnnnnnnnnnnnnnnnnnnnnnnnnnnnnnnnnnnnnnnnnnnnnnnnnnnnnnnnnnnnnnnnnnnnnnnnnnnnnnnnnnnnnnnnnnnnnnnnnnnnnnnnnnnnnnnnnnnnnnnnnnnnnnnnnnnnnnnnnnnnnnnnnnnnnnnnnnnnnnnnnnnnnnnnnnnnnnnnnnnnnnnnnnnnnnnnnnnnnnnnnnnnnnnnnnnnnnnnnnnnnnnnnnnnnnnnnnnnnnnnnnnnnnnnnnnnnnnnnnnnnnnnnnnnnnnnnnnnnnnnnnnnnnnnnnnnnnnnnnnnnnnnnnnnnnnnnnnnnnnnnnnnnnnnnnnnnnnnnnnnnnnnnnnnnnnnnnnnnnnnnnnnnnnnnnnnnnnnnnnnnnnnnnnnnnnnnnnnnnnnnnnnnnnnnnnnnnnnnnnnnnnnnnnnnnnnnnnnnnnnnnnnnnnnnnnnnnnnnnnnnnnnnnnnnnnnnnnnnnnnnnnnnnnnnnnnnnnnnnnnnnnnnnnnnnnnnnnnnnnnnnnnnnnnnnnnnnnnnnnnnnnnnnnnnnnnnnnnnnnnnnnnnnnnnnnnnnnnnnnnnnnnnnnnnnnnnnnnnnnnnnnnnnnnnnnnnnnnnnnnnnnnnnnnnnnnnnnnnnnnnnnnnnnnnnnnnnnnnnnnnnnnnnnnnnnnnnnnnnnnnnnnnnnnnnnnnnnnnnnnnnnnnnnnnnnnnnnnnnnnnnnnnnnnnnnnnnnnnnnnnnnnnnnnnnnnnnnnnnnnnnnnnnnnnnnnnnnnnnnnnnnnnnnnnnnnnnnnnnnnnnnnnnnnnnnnnnnnnnnnnnnnnnnnnnnnnnnnnnnnnnnnnnnnnnnnnnnnnnnnnnnnnnnnnnnnnnnnnnnnnnnnnnnnnnnnnnnnnnnnnnnnnnnnnnnnnnnnnnnnnnnnnnnnnnnnnnnnnnnnnnnnnnnnnnnnnnnnnnnnnnnnnnnnnnnnnnnnnnnnnnnnnnnnnnnnnnnnnnnnnnnnnnnnnnnnnnnnnnnnnnnnnnnnnnnnnnnnnnnnnnnnnnnnnnnnnnnnnnnnnnnnnnnnnnnnnnnnnnnnnnnnnnnnnnnnnnnnnnnnnnnnnnnnnnnnnnnnnnnnnnnnnnnnnnnnnnnnnnnnnnnnnnnnnnnnnnnnnnnnnnnnnnnnnnnnnnnnnnnnnnnnnnnnnnnnnnnnnnnnnnnnnnnnnnnnnnnnnnnnnnnnnnnnnnnnnnnnnnnnnnnnnnnnnnnnnnnnnnnnnnnnnnnnnnnnnnnnnnnnnnnnnnnnnnnnnnnnnnnnnnnnnnnnnnnnnnnnnnnnnnnnnnnnnnnnnnnnnnnnnnnnnnnnnnnnnnnnnnnnnnnnnnnnnnnnnnnnnnnnnnnnnnnnnnnnnnnnnnnnnnnnnnnnnnnnnnnnnnnnnnnnnnnnnnnnnnnnnnnnnnnnnnnnnnnnnnnnnnnnnnnnnnnnnnnnnnnnnnnnnnnnnnnnnnnnnnnnnnnnnnnnnnnnnnnnnnnnnnnnnnnnnnnnnnnnnnnnnnnnnnnnnnnnnnnnnnnnnnnnnnnnnnnnnnnnnnnnnnnnnnnnnnnnnnnnnnnnnnnnnnnnnnnnnnnnnnnnnnnnnnnnnnnnnnnnnnnnnnnnnnnnnnnnnnnnnnnnnnnnnnnnnnnnnnnnnnnnnnnnnnnnnnnnnnnnnnnnnnnnnnnnnnnnnnnnnnnnnnnnnnnnnnnnnnnnnnnnnnnnnnnnnnnnnnnnnnnnnnnnnnnnnnnnnnnnnnnnnnnnnnnnnnnnnnnnnnnnnnnnnnnnnnnnnnnnnnnnnnnnnnnnnnnnnnnnnnnnnnnnnnnnnnnnnnnnnnnnnnnnnnnnnnnnnnnnnnnnnnnnnnnnnnnnnnnnnnnnnnnnnnnnnnnnnnnnnnnnnnnnnnnnnnnnnnnnnnnnnnnnnnnnnnnnnnnnnnnnnnnnnnnnnnnnnnnnnnnnnnnnnnnnnnnnnnnnnnnnnnnnnnnnnnnnnnnnnnnnnnnnnnnnnnnnnnnnnnnnnnnnnnnnnnnnnnnnnnnnnnnnnnnnnnnnnnnnnnnnnnnnnnnnnnnnnnnnnnnnnnnnnnnnnnnnnnnnnnnnnnnnnnnnnnnnnnnnnnnnnnnnnnnnnnnnnnnnnnnnnnnnnnnnnnnnnnnnnnnnnnnnnnnnnnnnnnnnnnnnnnnnnnnnnnnnnnnnnnnnnnnnnnnnnnnnnnnnnnnnnnnnnnnnnnnnnnnnnnnnnnnnnnnnnnnnnnnnnnnnnnnnnnnnnnnnnnnnnnnnnnnnnnnnnnnnnnnnnnnnnnnnnnnnnnnnnnnnnnnnnnnnnnnnnnnnnnnnnnnnnnnnnnnnnnnnnnnnnnnnnnnnnnnnnnnnnnnnnnnnnnnnnnnnnnnnnnnnnnnnnnnnnnnnnnnnnnnnnnnnnnnnnnnnnnnnnnnnnnnnnnnnnnnnnnnnnnnnnnnnnnnnnnnnnnnnnnnnnnnnnnnnnnnnnnnnnnnnnnnnnnnnnnnnnnnnnnnnnnnnnnnnnnnnnnnnnnnnnnnnnnnnnnnnnnnnnnnnnnnnnnnnnnnnnnnnnnnnnnnnnnnnnnnnnnnnnnnnnnnnnnnnnnnnnnnnnnnnnnnnnnnnnnnnnnnnnnnnnnnnnnnnnnnnnnnnnnnnnnnnnnnnnnnnnnnnnnnnnnnnnnnnnnnnnnnnnnnnnnnnnnnnnnnnnnnnnnnnnnnnnnnnnnnnnnnnnnnnnnnnnnnnnnnnnnnnnnnnnnnnnnnnnnnnnnnnnnnnnnnnnnnnnnnnnnnnnnnnnnnnnnnnnnnnnnnnnnnnnnnnnnnnnnnnnnnnnnnnnnnnnnnnnnnnnnnnnnnnnnnnnnnnnnnnnnnnnnnnnnnnnnnnnnnnnnnnnnnnnnnnnnnnnnnnnnnnnnnnnnnnnnnnnnnnnnnnnnnnnnnnnnnnnnnnnnnnnnnnnnnnnnnnnnnnnnnnnnnnnnnnnnnnnnnnnnnnnnnnnnnnnnnnnnnnnnnnnnnnnnnnnnnnnnnnnnnnnnnnnnnnnnnnnnnnnnnnnnnnnnnnnnnnnnnnnnnnnnnnnnnnnnnnnnnnnnnnnnnnnnnnnnnnnnnnnnnnnnnnnnnnnnnnnnnnnnnnnnnnnnnnnnnnnnnnnnnnnnnnnnnnnnnnnnnnnnnnnnnnnnnnnnnnnnnnnnnnnnnnnnnnnnnnnnnnnnnnnnnnnnnnnnnnnnnnnnnnnnnnnnnnnnnnnnnnnnnnnnnnnnnnnnnnnnnnnnnnnnnnnnnnnnnnnnnnnnnnnnnnnnnnnnnnnnnnnnnnnnnnnnnnnnnnnnnnnnnnnnnnnnnnnnnnnnnnnnnnnnnnnnnnnnnnnnnnnnnnnnnnnnnnnnnnnnnnnnnnnnnnnnnnnnnnnnnnnnnnnnnnnnnnnnnnnnnnnnnnnnnnnnnnnnnnnnnnnnnnnnnnnnnnnnnnnnnnnnnnnnnnnnnnnnnnnnnnnnnnnnnnnnnnnnnnnnnnnnnnnnnnnnnnnnnnnnnnnnnnnnnnnnnnnnnnnnnnnnnnnnnnnnnnnnnnnnnnnnnnnnnnnnnnnnnnnnnnnnnnnnnnnnnnnnnnnnnnnnnnnnnnnnnnnnnnnnnnnnnnnnnnnnnnnnnnnnnnnnnnnnnnnnnnnnnnnnnnnnnnnnnnnnnnnnnnnnnnnnnnnnnnnnnnnnnnnnnnnnnnnnnnnnnnnnnnnnnnnnnnnnnnnnnnnnnnnnnnnnnnnnnnnnnnnnnnnnnnnnnnnnnnnnnnnnnnnnnnnnnnnnnnnnnnnnnnnnnnnnnnnnnnnnnnnnnnnnnnnnnnnnnnnnnnnnnnnnnnnnnnnnnnnnnnnnnnnnnnnnnnnnnnnnnnnnnnnnnnnnnnnnnnnnnnnnnnnnnnnnnnnnnnnnnnnnnnnnnnnnnnnnnnnnnnnnnnnnnnnnnnnnnnnnnnnnnnnnnnnnnnnnnnnnnnnnnnnnnnnnnnnnnnnnnnnnnnnnnnnnnnnnnnnnnnnnnnnnnnnnnnnnnnnnnnnnnnnnnnnnnnnnnnnnnnnnnnnnnnnnnnnnnnnnnnnnnnnnnnnnnnnnnnnnnnnnnnnnnnnnnnnnnnnnnnnnnnnnnnnnnnnnnnnnnnnnnnnnnnnnnnnnnnnnnnnnnnnnnnnnnnnnnnnnnnnnnnnnnnnnnnnnnnnnnnnnnnnnnnnnnnnnnnnnnnnnnnnnnnnnnnnnnnnnnnnnnnnnnnnnnnnnnnnnnnnnnnnnnnnnnnnnnnnnnnnnnnnnnnnnnnnnnnnnnnnnnnnnnnnnnnnnnnnnnnnnnnnnnnnnnnnnnnnnnnnnnnnnnnnnnnnnnnnnnnnnnnnnnnnnnnnnnnnnnnnnnnnnnnnnnnnnnnnnnnnnnnnnnnnnnnnnnnnnnnnnnnnnnnnnnnnnnnnnnnnnnnnnnnnnnnnnnnnnnnnnnnnnnnnnnnnnnnnnnnnnnnnnnnnnnnnnnnnnnnnnnnnnnnnnnnnnnnnnnnnnnnnnnnnnnnnnnnnnnnnnnnnnnnnnnnnnnnnnnnnnnnnnnnnnnnnnnnnnnnnnnnnnnnnnnnnnnnnnnnnnnnnnnnnnnnnnnnnnnnnnnnnnnnnnnnnnnnnnnnnnnnnnnnnnnnnnnnnnnnnnnnnnnnnnnnnnnnnnnnnnnnnnnnnnnnnnnnnnnnnnnnnnnnnnnnnnnnnnnnnnnnnnnnnnnnnnnnnnnnnnnnnnnnnnnnnnnnnnnnnnnnnnnnnnnnnnnnnnnnnnnnnnnnnnnnnnnnnnnnnnnnnnnnnnnnnnnnnnnnnnnnnnnnnnnnnnnnnnnnnnnnnnnnnnnnnnnnnnnnnnnnnnnnnnnnnnnnnnnnnnnnnnnnnnnnnnnnnnnnnnnnnnnnnnnnnnnnnnnnnnnnnnnnnnnnnnnnnnnnnnnnnnnnnnnnnnnnnnnnnnnnnnnnnnnnnnnnnnnnnnnnnnnnnnnnnnnnnnnnnnnnnnnnnnnnnnnnnnnnnnnnnnnnnnnnnnnnnnnnnnnnnnnnnnnnnnnnnnnnnnnnnnnnnnnnnnnnnnnnnnnnnnnnnnnnnnnnnnnnnnnnnnnnnnnnnnnnnnnnnnnnnnnnnnnnnnnnnnnnnnnnnnnnnnnnnnnnnnnnnnnnnnnnnnnnnnnnnnnnnnnnnnnnnnnnnnnnnnnnnnnnnnnnnnnnnnnnnnnnnnnnnnnnnnnnnnnnnnnnnnnnnnnnnnnnnnnnnnnnnnnnnnnnnnnnnnnnnnnnnnnnnnnnnnnnnnnnnnnnnnnnnnnnnnnnnnnnnnnnnnnnnnnnnnnnnnnnnnnnnnnnnnnnnnnnnnnnnnnnnnnnnnnnnnnnnnnnnnnnnnnnnnnnnnnnnnnnnnnnnnnnnnnnnnnnnnnnnnnnnnnnnnnnnnnnnnnnnnnnnnnnnnnnnnnnnnnnnnnnnnnnnnnnnnnnnnnnnnnnnnnnnnnnnnnnnnnnnnnnnnnnnnnnnnnnnnnnnnnnnnnnnnnnnnnnnnnnnnnnnnnnnnnnnnnnnnnnnnnnnnnnnnnnnnnnnnnnnnnnnnnnnnnnnnnnnnnnnnnnnnnnnnnnnnnnnnnnnnnnnnnnnnnnnnnnnnnnnnnnnnnnnnnnnnnnnnnnnnnnnnnnnnnnnnnnnnnnnnnnnnnnnnnnnnnnnnnnnnnnnnnnnnnnnnnnnnnnnnnnnnnnnnnnnnnnnnnnnnnnnnnnnnnnnnnnnnnnnnnnnnnnnnnnnnnnnnnnnnnnnnnnnnnnnnnnnnnnnnnnnnnnnnnnnnnnnnnnnnnnnnnnnnnnnnnnnnnnnnnnnnnnnnnnnnnnnnnnnnnnnnnnnnnnnnnnnnnnnnnnnnnnnnnnnnnnnnnnnnnnnnnnnnnnnnnnnnnnnnnnnnnnnnnnnnnnnnnnnnnnnnnnnnnnnnnnnnnnnnnnnnnnnnnnnnnnnnnnnnnnnnnnnnnnnnnnnnnnnnnnnnnnnnnnnnnnnnnnnnnnnnnnnnnnnnnnnnnnnnnnnnnnnnnnnnnnnnnnnnnnnnnnnnnnnnnnnnnnnnnnnnnnnnnnnnnnnnnnnnnnnnnnnnnnnnnnnnnnnnnnnnnnnnnnnnnnnnnnnnnnnnnnnnnnnnnnnnnnnnnnnnnnnnnnnnnnnnnnnnnnnnnnnnnnnnnnnnnnnnnnnnnnnnnnnnnnnnnnnnnnnnnnnnnnnnnnnnnnnnnnnnnnnnnnnnnnnnnnnnnnnnnnnnnnnnnnnnnnnnnnnnnnnnnnnnnnnnnnnnnnnnnnnnnnnnnnnnnnnnnnnnnnnnnnnnnnnnnnnnnnnnnnnnnnnnnnnnnnnnnnnnnnnnnnnnnnnnnnnnnnnnnnnnnnnnnnnnnnnnnnnnnnnnnnnnnnnnnnnnnnnnnnnnnnnnnnnnnnnnnnnnnnnnnnnnnnnnnnnnnnnnnnnnnnnnnnnnnnnnnnnnnnnnnnnnnnnnnnnnnnnnnnnnnnnnnnnnnnnnnnnnnnnnnnnnnnnnnnnnnnnnnnnnnnnnnnnnnnnnnnnnnnnnnnnnnnnnnnnnnnnnnnnnnnnnnnnnnnnnnnnnnnnnnnnnnnnnnnnnnnnnnnnnnnnnnnnnnnnnnnnnnnnnnnnnnnnnnnnnnnnnnnnnnnnnnnnnnnnnnnnnnnnnnnnnnnnnnnnnnnnnnnnnnnnnnnnnnnnnnnnnnnnnnnnnnnnnnnnnnnnnnnnnnnnnnnnnnnnnnnnnnnnnnnnnnnnnnnnnnnnnnnnnnnnnnnnnnnnnnnnnnnnnnnnnnnnnnnnnnnnnnnnnnnnnnnnnnnnnnnnnnnnnnnnnnnnnnnnnnnnnnnnnnnnnnnnnnnnnnnnnnnnnnnnnnnnnnnnnnnnnnnnnnnnnnnnnnnnnnnnnnnnnnnnnnnnnnnnnnnnnnnnnnnnnnnnnnnnnnnnnnnnnnnnnnnnnnnnnnnnnnnnnnnnnnnnnnnnnnnnnnnnnnnnnnnnnnnnnnnnnnnnnnnnnnnnnnnnnnnnnnnnnnnnnnnnnnnnnnnnnnnnnnnnnnnnnnnnnnnnnnnnnnnnnnnnnnnnnnnnnnnnnnnnnnnnnnnnnnnnnnnnnnnnnnnnnnnnnnnnnnnnnnnnnnnnnnnnnnnnnnnnnnnnnnnnnnnnnnnnnnnnnnnnnnnnnnnnnnnnnnnnnnnnnnnnnnnnnnnnnnnnnnnnnnnnnnnnnnnnnnnnnnnnnnnnnnnnnnnnnnnnnnnnnnnnnnnnnnnnnnnnnnnnnnnnnnnnnnnnnnnnnnnnnnnnnnnnnnnnnnnnnnnnnnnnnnnnnnnnnnnnnnnnnnnnnnnnnnnnnnnnnnnnnnnnnnnnnnnnnnnnnnnnnnnnnnnnnnnnnnnnnnnnnnnnnnnnnnnnnnnnnnnnnnnnnnnnnnnnnnnnnnnnnnnnnnnnnnnnnnnnnnnnnnnnnnnnnnnnnnnnnnnnnnnnnnnnnnnnnnnnnnnnnnnnnnnnnnnnnnnnnnnnnnnnnnnnnnnnnnnnnnnnnnnnnnnnnnnnnnnnnnnnnnnnnnnnnnnnnnnnnnnnnnnnnnnnnnnnnnnnnnnnnnnnnnnnnnnnnnnnnnnnnnnnnnnnnnnnnnnnnnnnnnnnnnnnnnnnnnnnnnnnnnnnnnnnnnnnnnnnnnnnnnnnnnnnnnnnnnnnnnnnnnnnnnnnnnnnnnnnnnnnnnnnnnnnnnnnnnnnnnnnnnnnnnnnnnnnnnnnnnnnnnnnnnnnnnnnnnnnnnnnnnnnnnnnnnnnnnnnnnnnnnnnnnnnnnnnnnnnnnnnnnnnnnnnnnnnnnnnnnnnnnnnnnnnnnnnnnnnnnnnnnnnnnnnnnnnnnnnnnnnnnnnnnnnnnnnnnnnnnnnnnnnnnnnnnnnnnnnnnnnnnnnnnnnnnnnnnnnnnnnnnnnnnnnnnnnnnnnnnnnnnnnnnnnnnnnnnnnnnnnnnnnnnnnnnnnnnnnnnnnnnnnnnnnnnnnnnnnnnnnnnnnnnnnnnnnnnnnnnnnnnnnnnnnnnnnnnnnnnnnnnnnnnnnnnnnnnnnnnnnnnnnnnnnnnnnnnnnnnnnnnnnnnnnnnnnnnnnnnnnnnnnnnnnnnnnnnnnnnnnnnnnnnnnnnnnnnnnnnnnnnnnnnnnnnnnnnnnnnnnnnnnnnnnnnnnnnnnnnnnnnnnnnnnnnnnnnnnnnnnnnnnnnnnnnnnnnnnnnnnnnnnnnnnnnnnnnnnnnnnnnnnnnnnnnnnnnnnnnnnnnnnnnnnnnnnnnnnnnnnnnnnnnnnnnnnnnnnnnnnnnnnnnnnnnnnnnnnnnnnnnnnnnnnnnnnnnnnnnnnnnnnnnnnnnnnnnnnnnnnnnnnnnnnnnnnnnnnnnnnnnnnnnnnnnnnnnnnnnnnnnnnnnnnnnnnnnnnnnnnnnnnnnnnnnnnnnnnnnnnnnnnnnnnnnnnnnnnnnnnnnnnnnnnnnnnnnnnnnnnnnnnnnnnnnnnnnnnnnnnnnnnnnnnnnnnnnnnnnnnnnnnnnnnnnnnnnnnnnnnnnnnnnnnnnnnnnnnnnnnnnnnnnnnnnnnnnnnnnnnnnnnnnnnnnnnnnnnnnnnnnnnnnnnnnnnnnnnnnnnnnnnnnnnnnnnnnnnnnnnnnnnnnnnnnnnnnnnnnnnnnnnnnnnnnnnnnnnnnnnnnnnnnnnnnnnnnnnnnnnnnnnnnnnnnnnnnnnnnnnnnnnnnnnnnnnnnnnnnnnnnnnnnnnnnnnnnnnnnnnnnnnnnnnnnnnnnnnnnnnnnnnnnnnnnnnnnnnnnnnnnnnnnnnnnnnnnnnnnnnnnnnnnnnnnnnnnnnnnnnnnnnnnnnnnnnnnnnnnnnnnnnnnnnnnnnnnnnnnnnnnnnnnnnnnnnnnnnnnnnnnnnnnnnnnnnnnnnnnnnnnnnnnnnnnnnnnnnnnnnnnnnnnnnnnnnnnnnnnnnnnnnnnnnnnnnnnnnnnnnnnnnnnnnnnnnnnnnnnnnnnnnnnnnnnnnnnnnnnnnnnnnnnnnnnnnnnnnnnnnnnnnnnnnnnnnnnnnnnnnnnnnnnnnnnnnnnnnnnnnnnnnnnnnnnnnnnnnnnnnnnnnnnnnnnnnnnnnnnnnnnnnnnnnnnnnnnnnnnnnnnnnnnnnnnnnnnnnnnnnnnnnnnnnnnnnnnnnnnnnnnnnnnnnnnnnnnnnnnnnnnnnnnnnnnnnnnnnnnnnnnnnnnnnnnnnnnnnnnnnnnnnnnnnnnnnnnnnnnnnnnnnnnnnnnnnnnnnnnnnnnnnnnnnnnnnnnnnnnnnnnnnnnnnnnnnnnnnnnnnnnnnnnnnnnnnnnnnnnnnnnnnnnnnnnnnnnnnnnnnnnnnnnnnnnnnnnnnnnnnnnnnnnnnnnnnnnnnnnnnnnnnnnnnnnnnnnnnnnnnnnnnnnnnnnnnnnnnnnnnnnnnnnnnnnnnnnnnnnnnnnnnnnnnnnnnnnnnnnnnnnnnnnnnnnnnnnnnnnnnnnnnnnnnnnnnnnnnnnnnnnnnnnnnnnnnnnnnnnnnnnnnnnnnnnnnnnnnnnnnnnnnnnnnnnnnnnnnnnnnnnnnnnnnnnnnnnnnnnnnnnnnnnnnnnnnnnnnnnnnnnnnnnnnnnnnnnnnnnnnnnnnnnnnnnnnnnnnnnnnnnnnnnnnnnnnnnnnnnnnnnnnnnnnnnnnnnnnnnnnnnnnnnnnnnnnnnnnnnnnnnnnnnnnnnnnnnnnnnnnnnnnnnnnnnnnnnnnnnnnnnnnnnnnnnnnnnnnnnnnnnnnnnnnnnnnnnnnnnnnnnnnnnnnnnnnnnnnnnnnnnnnnnnnnnnnnnnnnnnnnnnnnnnnnnnnnnnnnnnnnnnnnnnnnnnnnnnnnnnnnnnnnnnnnnnnnnnnnnnnnnnnnnnnnnnnnnnnnnnnnnnnnnnnnnnnnnnnnnnnnnnnnnnnnnnnnnnnnnnnnnnnnnnnnnnnnnnnnnnnnnnnnnnnnnnnnnnnnnnnnnnnnnnnnnnnnnnnnnnnnnnnnnnnnnnnnnnnnnnnnnnnnnnnnnnnnnnnnnnnnnnnnnnnnnnnnnnnnnnnnnnnnnnnnnnnnnnnnnnnnnnnnnnnnnnnnnnnnnnnnnnnnnnnnnnnnnnnnnnnnnnnnnnnnnnnnnnnnnnnnnnnnnnnnnnnnnnnnnnnnnnnnnnnnnnnnnnnnnnnnnnnnnnnnnnnnnnnnnnnnnnnnnnnnnnnnnnnnnnnnnnnnnnnnnnnnnnnnnnnnnnnnnnnnnnnnnnnnnnnnnnnnnnnnnnnnnnnnnnnnnnnnnnnnnnnnnnnnnnnnnnnnnnnnnnnnnnnnnnnnnnnnnnnnnnnnnnnnnnnnnnnnnnnnnnnnnnnnnnnnnnnnnnnnnnnnnnnnnnnnnnnnnnnnnnnnnnnnnnnnnnnnnnnnnnnnnnnnnnnnnnnnnnnnnnnnnnnnnnnnnnnnnnnnnnnnnnnnnnnnnnnnnnnnnnnnnnnnnnnnnnnnnnnnnnnnnnnnnnnnnnnnnnnnnnnnnnnnnnnnnnnnnnnnnnnnnnnnnnnnnnnnnnnnnnnnnnnnnnnnnnnnnnnnnnnnnnnnnnnnnnnnnnnnnnnnnnnnnnnnnnnnnnnnnnnnnnnnnnnnnnnnnnnnnnnnnnnnnnnnnnnnnnnnnnnnnnnnnnnnnnnnnnnnnnnnnnnnnnnnnnnnnnnnnnnnnnnnnnnnnnnnnnnnnnnnnnnnnnnnnnnnnnnnnnnnnnnnnnnnnnnnnnnnnnnnnnnnnnnnnnnnnnnnnnnnnnnnnnnnnnnnnnnnnnnnnnnnnnnnnnnnnnnnnnnnnnnnnnnnnnnnnnnnnnnnnnnnnnnnnnnnnnnnnnnnnnnnnnnnnnnnnnnnnnnnnnnnnnnnnnnnnnnnnnnnnnnnnnnnnnnnnnnnnnnnnnnnnnnnnnnnnnnnnnnnnnnnnnnnnnnnnnnnnnnnnnnnnnnnnnnnnnnnnnnnnnnnnnnnnnnnnnnnnnnnnnnnnnnnnnnnnnnnnnnnnnnnnnnnnnnnnnnnnnnnnnnnnnnnnnnnnnnnnnnnnnnnnnnnnnnnnnnnnnnnnnnnnnnnnnnnnnnnnnnnnnnnnnnnnnnnnnnnnnnnnnnnnnnnnnnnnnnnnnnnnnnnnnnnnnnnnnnnnnnnnnnnnnnnnnnnnnnnnnnnnnnnnnnnnnnnnnnnnnnnnnnnnnnnnnnnnnnnnnnnnnnnnnnnnnnnnnnnnnnnnnnnnnnnnnnnnnnnnnnnnnnnnnnnnnnnnnnnnnnnnnnnnnnnnnnnnnnnnnnnnnnnnnnnnnnnnnnnnnnnnnnnnnnnnnnnnnnnnnnnnnnnnnnnnnnnnnnnnnnnnnnnnnnnnnnnnnnnnnnnnnnnnnnnnnnnnnnnnnnnnnnnnnnnnnnnnnnnnnnnnnnnnnnnnnnnnnnnnnnnnnnnnnnnnnnnnnnnnnnnnnnnnnnnnnnnnnnnnnnnnnnnnnnnnnnnnnnnnnnnnnnnnnnnnnnnnnnnnnnnnnnnnnnnnnnnnnnnnnnnnnnnnnnnnnnnnnnnnnnnnnnnnnnnnnnnnnnnnnnnnnnnnnnnnnnnnnnnnnnnnnnnnnnnnnnnnnnnnnnnnnnnnnnnnnnnnnnnnnnnnnnnnnnnnnnnnnnnnnnnnnnnnnnnnnnnnnnnnnnnnnnnnnnnnnnnnnnnnnnnnnnnnnnnnnnnnnnnnnnnnnnnnnnnnnnnnnnnnnnnnnnnnnnnnnnnnnnnnnnnnnnnnnnnnnnnnnnnnnnnnnnnnnnnnnnnnnnnnnnnnnnnnnnnnnnnnnnnnnnnnnnnnnnnnnnnnnnnnnnnnnnnnnnnnnnnnnnnnnnnnnnnnnnnnnnnnnnnnnnnnnnnnnnnnnnnnnnnnnnnnnnnnnnnnnnnnnnnnnnnnnnnnnnnnnnnnnnnnnnnnnnnnnnnnnnnnnnnnnnnnnnnnnnnnnnnnnnnnnnnnnnnnnnnnnnnnnnnnnnnnnnnnnnnnnnnnnnnnnnnnnnnnnnnnnnnnnnnnnnnnnnnnnnnnnnnnnnnnnnnnnnnnnnnnnnnnnnnnnnnnnnnnnnnnnnnnnnnnnnnnnnnnnnnnnnnnnnnnnnnnnnnnnnnnnnnnnnnnnnnnnnnnnnnnnnnnnnnnnnnnnnnnnnnnnnnnnnnnnnnnnnnnnnnnnnnnnnnnnnnnnnnnnnnnnnnnnnnnnnnnnnnnnnnnnnnnnnnnnnnnnnnnnnnnnnnnnnnnnnnnnnnnnnnnnnnnnnnnnnnnnnnnnnnnnnnnnnnnnnnnnnnnnnnnnnnnnnnnnnnnnnnnnnnnnnnnnnnnnnnnnnnnnnnnnnnnnnnnnnnnnnnnnnnnnnnnnnnnnnnnnnnnnnnnnnnnnnnnnnnnnnnnnnnnnnnnnnnnnnnnnnnnnnnnnnnnnnnnnnnnnnnnnnnnnnnnnnnnnnnnnnnnnnnnnnnnnnnnnnnnnnnnnnnnnnnnnnnnnnnnnnnnnnnnnnnnnnnnnnnnnnnnnnnnnnnnnnnnnnnnnnnnnnnnnnnnnnnnnnnnnnnnnnnnnnnnnnnnnnnnnnnnnnnnnnnnnnnnnnnnnnnnnnnnnnnnnnnnnnnnnnnnnnnnnnnnnnnnnnnnnnnnnnnnnnnnnnnnnnnnnnnnnnnnnnnnnnnnnnnnnnnnnnnnnnnnnnnnnnnnnnnnnnnnnnnnnnnnnnnnnnnnnnnnnnnnnnnnnnnnnnnnnnnnnnnnnnnnnnnnnnnnnnnnnnnnnnnnnnnnnnnnnnnnnnnnnnnnnnnnnnnnnnnnnnnnnnnnnnnnnnnnnnnnnnnnnnnnnnnnnnnnnnnnnnnnnnnnnnnnnnnnnnnnnnnnnnnnnnnnnnnnnnnnnnnnnnnnnnnnnnnnnnnnnnnnnnnnnnnnnnnnnnnnnnnnnnnnnnnnnnnnnnnnnnnnnnnnnnnnnnnnnnnnnnnnnnnnnnnnnnnnnnnnnnnnnnnnnnnnnnnnnnnnnnnnnnnnnnnnnnnnnnnnnnnnnnnnnnnnnnnnnnnnnnnnnnnnnnnnnnnnnnnnnnnnnnnnnnnnnnnnnnnnnnnnnnnnnnnnnnnnnnnnnnnnnnnnnnnnnnnnnnnnnnnnnnnnnnnnnnnnnnnnnnnnnnnnnnnnnnnnnnnnnnnnnnnnnnnnnnnnnnnnnnnnnnnnnnnnnnnnnnnnnnnnnnnnnnnnnnnnnnnnnnnnnnnnnnnnnnnnnnnnnnnnnnnnnnnnnnnnnnnnnnnnnnnnnnnnnnnnnnnnnnnnnnnnnnnnnnnnnnnnnnnnnnnnnnnnnnnnnnnnnnnnnnnnnnnnnnnnnnnnnnnnnnnnnnnnnnnnnnnnnnnnnnnnnnnnnnnnnnnnnnnnnnnnnnnnnnnnnnnnnnnnnnnnnnnnnnnnnnnnnnnnnnnnnnnnnnnnnnnnnnnnnnnnnnnnnnnnnnnnnnnnnnnnnnnnnnnnnnnnnnnnnnnnnnnnnnnnnnnnnnnnnnnnnnnnnnnnnnnnnnnnnnnnnnnnnnnnnnnnnnnnnnnnnnnnnnnnnnnnnnnnnnnnnnnnnnnnnnnnnnnnnnnnnnnnnnnnnnnnnnnnnnnnnnnnnnnnnnnnnnnnnnnnnnnnnnnnnnnnnnnnnnnnnnnnnnnnnnnnnnnnnnnnnnnnnnnnnnnnnnnnnnnnnnnnnnnnnnnnnnnnnnnnnnnnnnnnnnnnnnnnnnnnnnnnnnnnnnnnnnnnnnnnnnnnnnnnnnnnnnnnnnnnnnnnnnnnnnnnnnnnnnnnnnnnnnnnnnnnnnnnnnnnnnnnnnnnnnnnnnnnnnnnnnnnnnnnnnnnnnnnnnnnnnnnnnnnnnnnnnnnnnnnnnnnnnnnnnnnnnnnnnnnnnnnnnnnnnnnnnnnnnnnnnnnnnnnnnnnnnnnnnnnnnnnnnnnnnnnnnnnnnnnnnnnnnnnnnnnnnnnnnnnnnnnnnnnnnnnnnnnnnnnnnnnnnnnnnnnnnnnnnnnnnnnnnnnnnnnnnnnnnnnnnnnnnnnnnnnnnnnnnnnnnnnnnnnnnnnnnnnnnnnnnnnnnnnnnnnnnnnnnnnnnnnnnnnnnnnnnnnnnnnnnnnnnnnnnnnnnnnnnnnnnnnnnnnnnnnnnnnnnnnnnnnnnnnnnnnnnnnnnnnnnnnnnnnnnnnnnnnnnnnnnnnnnnnnnnnnnnnnnnnnnnnnnnnnnnnnnnnnnnnnnnnnnnnnnnnnnnnnnnnnnnnnnnnnnnnnnnnnnnnnnnnnnnnnnnnnnnnnnnnnnnnnnnnnnnnnnnnnnnnnnnnnnnnnnnnnnnnnnnnnnnnnnnnnnnnnnnnnnnnnnnnnnnnnnnnnnnnnnnnnnnnnnnnnnnnnnnnnnnnnnnnnnnnnnnnnnnnnnnnnnnnnnnnnnnnnnnnnnnnnnnnnnnnnnnnnnnnnnnnnnnnnnnnnnnnnnnnnnnnnnnnnnnnnnnnnnnnnnnnnnnnnnnnnnnnnnnnnnnnnnnnnnnnnnnnnnnnnnnnnnnnnnnnnnnnnnnnnnnnnnnnnnnnnnnnnnnnnnnnnnnnnnnnnnnnnnnnnnnnnnnnnnnnnnnnnnnnnnnnnnnnnnnnnnnnnnnnnnnnnnnnnnnnnnnnnnnnnnnnnnnnnnnnnnnnnnnnnnnnnnnnnnnnnnnnnnnnnnnnnnnnnnnnnnnnnnnnnnnnnnnnnnnnnnnnnnnnnnnnnnnnnnnnnnnnnnnnnnnnnnnnnnnnnnnnnnnnnnnnnnnnnnnnnnnnnnnnnnnnnnnnnnnnnnnnnnnnnnnnnnnnnnnnnnnnnnnnnnnnnnnnnnnnnnnnnnnnnnnnnnnnnnnnnnnnnnnnnnnnnnnnnnnnnnnnnnnnnnnnnnnnnnnnnnnnnnnnnnnnnnnnnnnnnnnnnnnnnnnnnnnnnnnnnnnnnnnnnnnnnnnnnnnnnnnnnnnnnnnnnnnnnnnnnnnnnnnnnnnnnnnnnnnnnnnnnnnnnnnnnnnnnnnnnnnnnnnnnnnnnnnnnnnnnnnnnnnnnnnnnnnnnnnnnnnnnnnnnnnnnnnnnnnnnnnnnnnnnnnnnnnnnnnnnnnnnnnnnnnnnnnnnnnnnnnnnnnnnnnnnnnnnnnnnnnnnnnnnnnnnnnnnnnnnnnnnnnnnnnnnnnnnnnnnnnnnnnnnnnnnnnnnnnnnnnnnnnnnnnnnnnnnnnnnnnnnnnnnnnnnnnnnnnnnnnnnnnnnnnnnnnnnnnnnnnnnnnnnnnnnnnnnnnnnnnnnnnnnnnnnnnnnnnnnnnnnnnnnnnnnnnnnnnnnnnnnnnnnnnnnnnnnnnnnnnnnnnnnnnnnnnnnnnnnnnnnnnnnnnnnnnnnnnnnnnnnnnnnnnnnnnnnnnnnnnnnnnnnnnnnnnnnnnnnnnnnnnnnnnnnnnnnnnnnnnnnnnnnnnnnnnnnnnnnnnnnnnnnnnnnnnnnnnnnnnnnnnnnnnnnnnnnnnnnnnnnnnnnnnnnnnnnnnnnnnnnnnnnnnnnnnnnnnnnnnnnnnnnnnnnnnnnnnnnnnnnnnnnnnnnnnnnnnnnnnnnnnnnnnnnnnnnnnnnnnnnnnnnnnnnnnnnnnnnnnnnnnnnnnnnnnnnnnnnnnnnnnnnnnnnnnnnnnnnnnnnnnnnnnnnnnnnnnnnnnnnnnnnnnnnnnnnnnnnnnnnnnnnnnnnnnnnnnnnnnnnnnnnnnnnnnnnnnnnnnnnnnnnnnnnnnnnnnnnnnnnnnnnnnnnnnnnnnnnnnnnnnnnnnnnnnnnnnnnnnnnnnnnnnnnnnnnnnnnnnnnnnnnnnnnnnnnnnnnnnnnnnnnnnnnnnnnnnnnnnnnnnnnnnnnnnnnnnnnnnnnnnnnnnnnnnnnnnnnnnnnnnnnnnnnnnnnnnnnnnnnnnnnnnnnnnnnnnnnnnnnnnnnnnnnnnnnnnnnnnnnnnnnnnnnnnnnnnnnnnnnnnnnnnnnnnnnnnnnnnnnnnnnnnnnnnnnnnnnnnnnnnnnnnnnnnnnnnnnnnnnnnnnnnnnnnnnnnnnnnnnnnnnnnnnnnnnnnnnnnnnnnnnnnnnnnnnnnnnnnnnnnnnnnnnnnnnnnnnnnnnnnnnnnnnnnnnnnnnnnnnnnnnnnnnnnnnnnnnnnnnnnnnnnnnnnnnnnnnnnnnnnnnnnnnnnnnnnnnnnnnnnnnnnnnnnnnnnnnnnnnnnnnnnnnnnnnnnnnnnnnnnnnnnnnnnnnnnnnnnnnnnnnnnnnnnnnnnnnnnnnnnnnnnnnnnnnnnnnnnnnnnnnnnnnnnnnnnnnnnnnnnnnnnnnnnnnnnnnnnnnnnnnnnnnnnnnnnnnnnnnnnnnnnnnnnnnnnnnnnnnnnnnnnnnnnnnnnnnnnnnnnnnnnnnnnnnnnnnnnnnnnnnnnnnnnnnnnnnnnnnnnnnnnnnnnnnnnnnnnnnnnnnnnnnnnnnnnnnnnnnnnnnnnnnnnnnnnnnnnnnnnnnnnnnnnnnnnnnnnnnnnnnnnnnnnnnnnnnnnnnnnnnnnnnnnnnnnnnnnnnnnnnnnnnnnnnnnnnnnnnnnnnnnnnnnnnnnnnnnnnnnnnnnnnnnnnnnnnnnnnnnnnnnnnnnnnnnnnnnnnnnnnnnnnnnnnnnnnnnnnnnnnnnnnnnnnnnnnnnnnnnnnnnnnnnnnnnnnnnnnnnnnnnnnnnnnnnnnnnnnnnnnnnnnnnnnnnnnnnnnnnnnnnnnnnnnnnnnnnnnnnnnnnnnnnnnnnnnnnnnnnnnnnnnnnnnnnnnnnnnnnnnnnnnnnnnnnnnnnnnnnnnnnnnnnnnnnnnnnnnnnnnnnnnnnnnnnnnnnnnnnnnnnnnnnnnnnnnnnnnnnnnnnnnnnnnnnnnnnnnnnnnnnnnnnnnnnnnnnnnnnnnnnnnnnnnnnnnnnnnnnnnnnnnnnnnnnnnnnnnnnnnnnnnnnnnnnnnnnnnnnnnnnnnnnnnnnnnnnnnnnnnnnnnnnnnnnnnnnnnnnnnnnnnnnnnnnnnnnnnnnnnnnnnnnnnnnnnnnnnnnnnnnnnnnnnnnnnnnnnnnnnnnnnnnnnnnnnnnnnnnnnnnnnnnnnnnnnnnnnnnnnnnnnnnnnnnnnnnnnnnnnnnnnnnnnnnnnnnnnnnnnnnnnnnnnnnnnnnnnnnnnnnnnnnnnnnnnnnnnnnnnnnnnnnnnnnnnnnnnnnnnnnnnnnnnnnnnnnnnnnnnnnnnnnnnnnnnnnnnnnnnnnnnnnnnnnnnnnnnnnnnnnnnnnnnnnnnnnnnnnnnnnnnnnnnnnnnnnnnnnnnnnnnnnnnnnnnnnnnnnnnnnnnnnnnnnnnnnnnnnnnnnnnnnnnnnnnnnnnnnnnnnnnnnnnnnnnnnnnnnnnnnnnnnnnnnnnnnnnnnnnnnnnnnnnnnnnnnnnnnnnnnnnnnnnnnnnnnnnnnnnnnnnnnnnnnnnnnnnnnnnnnnnnnnnnnnnnnnnnnnnnnnnnnnnnnnnnnnnnnnnnnnnnnnnnnnnnnnnnnnnnnnnnnnnnnnnnnnnnnnnnnnnnnnnnnnnnnnnnnnnnnnnnnnnnnnnnnnnnnnnnnnnnnnnnnnnnnnnnnnnnnnnnnnnnnnnnnnnnnnnnnnnnnnnnnnnnnnnnnnnnnnnnnnnnnnnnnnnnnnnnnnnnnnnnnnnnnnnnnnnnnnnnnnnnnnnnnnnnnnnnnnnnnnnnnnnnnnnnnnnnnnnnnnnnnnnnnnnnnnnnnnnnnnnnnnnnnnnnnnnnnnnnnnnnnnnnnnnnnnnnnnnnnnnnnnnnnnnnnnnnnnnnnnnnnnnnnnnnnnnnnnnnnnnnnnnnnnnnnnnnnnnnnnnnnnnnnnnnnnnnnnnnnnnnnnnnnnnnnnnnnnnnnnnnnnnnnnnnnnnnnnnnnnnnnnnnnnnnnnnnnnnnnnnnnnnnnnnnnnnnnnnnnnnnnnnnnnnnnnnnnnnnnnnnnnnnnnnnnnnnnnnnnnnnnnnnnnnnnnnnnnnnnnnnnnnnnnnnnnnnnnnnnnnnnnnnnnnnnnnnnnnnnnnnnnnnnnnnnnnnnnnnnnnnnnnnnnnnnnnnnnnnnnnnnnnnnnnnnnnnnnnnnnnnnnnnnnnnnnnnnnnnnnnnnnnnnnnnnnnnnnnnnnnnnnnnnnnnnnnnnnnnnnnnnnnnnnnnnnnnnnnnnnnnnnnnnnnnnnnnnnnnnnnnnnnnnnnnnnnnnnnnnnnnnnnnnnnnnnnnnnnnnnnnnnnnnnnnnnnnnnnnnnnnnnnnnnnnnnnnnnnnnnnnnnnnnnnnnnnnnnnnnnnnnnnnnnnnnnnnnnnnnnnnnnnnnnnnnnnnnnnnnnnnnnnnnnnnnnnnnnnnnnnnnnnnnnnnnnnnnnnnnnnnnnnnnnnnnnnnnnnnnnnnnnnnnnnnnnnnnnnnnnnnnnnnnnnnnnnnnnnnnnnnnnnnnnnnnnnnnnnnnnnnnnnnnnnnnnnnnnnnnnnnnnnnnnnnnnnnnnnnnnnnnnnnnnnnnnnnnnnnnnnnnnnnnnnnnnnnnnnnnnnnnnnnnnnnnnnnnnnnnnnnnnnnnnnnnnnnnnnnnnnnnnnnnnnnnnnnnnnnnnnnnnnnnnnnnnnnnnnnnnnnnnnnnnnnnnnnnnnnnnnnnnnnnnnnnnnnnnnnnnnnnnnnnnnnnnnnnnnnnnnnnnnnnnnnnnnnnnnnnnnnnnnnnnnnnnnnnnnnnnnnnnnnnnnnnnnnnnnnnnnnnnnnnnnnnnnnnnnnnnnnnnnnnnnnnnnnnnnnnnnnnnnnnnnnnnnnnnnnnnnnnnnnnnnnnnnnnnnnnnnnnnnnnnnnnnnnnnnnnnnnnnnnnnnnnnnnnnnnnnnnnnnnnnnnnnnnnnnnnnnnnnnnnnnnnnnnnnnnnnnnnnnnnnnnnnnnnnnnnnnnnnnnnnnnnnnnnnnnnnnnnnnnnnnnnnnnnnnnnnnnnnnnnnnnnnnnnnnnnnnnnnnnnnnnnnnnnnnnnnnnnnnnnnnnnnnnnnnnnnnnnnnnnnnnnnnnnnnnnnnnnnnnnnnnnnnnnnnnnnnnnnnnnnnnnnnnnnnnnnnnnnnnnnnnnnnnnnnnnnnnnnnnnnnnnnnnnnnnnnnnnnnnnnnnnnnnnnnnnnnnnnnnnnnnnnnnnnnnnnnnnnnnnnnnnnnnnnnnnnnnnnnnnnnnnnnnnnnnnnnnnnnnnnnnnnnnnnnnnnnnnnnnnnnnnnnnnnnnnnnnnnnnnnnnnnnnnnnnnnnnnnnnnnnnnnnnnnnnnnnnnnnnnnnnnnnnnnnnnnnnnnnnnnnnnnnnnnnnnnnnnnnnnnnnnnnnnnnnnnnnnnnnnnnnnnnnnnnnnnnnnnnnnnnnnnnnnnnnnnnnnnnnnnnnnnnnnnnnnnnnnnnnnnnnnnnnnnnnnnnnnnnnnnnnnnnnnnnnnnnnnnnnnnnnnnnnnnnnnnnnnnnnnnnnnnnnnnnnnnnnnnnnnnnnnnnnnnnnnnnnnnnnnnnnnnnnnnnnnnnnnnnnnnnnnnnnnnnnnnnnnnnnnnnnnnnnnnnnnnnnnnnnnnnnnnnnnnnnnnnnnnnnnnnnnnnnnnnnnnnnnnnnnnnnnnnnnnnnnnnnnnnnnnnnnnnnnnnnnnnnnnnnnnnnnnnnnnnnnnnnnnnnnnnnnnnnnnnnnnnnnnnnnnnnnnnnnnnnnnnnnnnnnnnnnnnnnnnnnnnnnnnnnnnnnnnnnnnnnnnnnnnnnnnnnnnnnnnnnnnnnnnnnnnnnnnnnnnnnnnnnnnnnnnnnnnnnnnnnnnnnnnnnnnnnnnnnnnnnnnnnnnnnnnnnnnnnnnnnnnnnnnnnnnnnnnnnnnnnnnnnnnnnnnnnnnnnnnnnnnnnnnnnnnnnnnnnnnnnnnnnnnnnnnnnnnnnnnnnnnnnnnnnnnnnnnnnnnnnnnnnnnnnnnnnnnnnnnnnnnnnnnnnnnnnnnnnnnnnnnnnnnnnnnnnnnnnnnnnnnnnnnnnnnnnnnnnnnnnnnnnnnnnnnnnnnnnnnnnnnnnnnnnnnnnnnnnnnnnnnnnnnnnnnnnnnnnnnnnnnnnnnnnnnnnnnnnnnnnnnnnnnnnnnnnnnnnnnnnnnnnnnnnnnnnnnnnnnnnnnnnnnnnnnnnnnnnnnnnnnnnnnnnnnnnnnnnnnnnnnnnnnnnnnnnnnnnnnnnnnnnnnnnnnnnnnnnnnnnnnnnnnnnnnnnnnnnnnnnnnnnnnnnnnnnnnnnnnnnnnnnnnnnnnnnnnnnnnnnnnnnnnnnnnnnnnnnnnnnnnnnnnnnnnnnnnnnnnnnnnnnnnnnnnnnnnnnnnnnnnnnnnnnnnnnnnnnnnnnnnnnnnnnnnnnnnnnnnnnnnnnnnnnnnnnnnnnnnnnnnnnnnnnnnnnnnnnnnnnnnnnnnnnnnnnnnnnnnnnnnnnnnnnnnnnnnnnnnnnnnnnnnnnnnnnnnnnnnnnnnnnnnnnnnnnnnnnnnnnnnnnnnnnnnnnnnnnnnnnnnnnnnnnnnnnnnnnnnnnnnnnnnnnnnnnnnnnnnnnnnnnnnnnnnnnnnnnnnnnnnnnnnnnnnnnnnnnnnnnnnnnnnnnnnnnnnnnnnnnnnnnnnnnnnnnnnnnnnnnnnnnnnnnnnnnnnnnnnnnnnnnnnnnnnnnnnnnnnnnnnnnnnnnnnnnnnnnnnnnnnnnnnnnnnnnnnnnnnnnnnnnnnnnnnnnnnnnnnnnnnnnnnnnnnnnnnnnnnnnnnnnnnnnnnnnnnnnnnnnnnnnnnnnnnnnnnnnnnnnnnnnnnnnnnnnnnnnnnnnnnnnnnnnnnnnnnnnnnnnnnnnnnnnnnnnnnnnnnnnnnnnnnnnnnnnnnnnnnnnnnnnnnnnnnnnnnnnnnnnnnnnnnnnnnnnnnnnnnnnnnnnnnnnnnnnnnnnnnnnnnnnnnnnnnnnnnnnnnnnnnnnnnnnnnnnnnnnnnnnnnnnnnnnnnnnnnnnnnnnnnnnnnnnnnnnnnnnnnnnnnnnnnnnnnnnnnnnnnnnnnnnnnnnnnnnnnnnnnnnnnnnnnnnnnnnnnnnnnnnnnnnnnnnnnnnnnnnnnnnnnnnnnnnnnnnnnnnnnnnnnnnnnnnnnnnnnnnnnnnnnnnnnnnnnnnnnnnnnnnnnnnnnnnnnnnnnnnnnnnnnnnnnnnnnnnnnnnnnnnnnnnnnnnnnnnnnnnnnnnnnnnnnnnnnnnnnnnnnnnnnnnnnnnnnnnnnnnnnnnnnnnnnnnnnnnnnnnnnnnnnnnnnnnnnnnnnnnnnnnnnnnnnnnnnnnnnnnnnnnnnnnnnnnnnnnnnnnnnnnnnnnnnnnnnnnnnnnnnnnnnnnnnnnnnnnnnnnnnnnnnnnnnnnnnnnnnnnnnnnnnnnnnnnnnnnnnnnnnnnnnnnnnnnnnnnnnnnnnnnnnnnnnnnnnnnnnnnnnnnnnnnnnnnnnnnnnnnnnnnnnnnnnnnnnnnnnnnnnnnnnnnnnnnnnnnnnnnnnnnnnnnnnnnnnnnnnnnnnnnnnnnnnnnnnnnnnnnnnnnnnnnnnnnnnnnnnnnnnnnnnnnnnnnnnnnnnnnnnnnnnnnnnnnnnnnnnnnnnnnnnnnnnnnnnnnnnnnnnnnnnnnnnnnnnnnnnnnnnnnnnnnnnnnnnnnnnnnnnnnnnnnnnnnnnnnnnnnnnnnnnnnnnnnnnnnnnnnnnnnnnnnnnnnnnnnnnnnnnnnnnnnnnnnnnnnnnnnnnnnnnnnnnnnnnnnnnnnnnnnnnnnnnnnnnnnnnnnnnnnnnnnnnnnnnnnnnnnnnnnnnnnnnnnnnnnnnnnnnnnnnnnnnnnnnnnnnnnnnnnnnnnnnnnnnnnnnnnnnnnnnnnnnnnnnnnnnnnnnnnnnnnnnnnnnnnnnnnnnnnnnnnnnnnnnnnnnnnnnnnnnnnnnnnnnnnnnnnnnnnnnnnnnnnnnnnnnnnnnnnnnnnnnnnnnnnnnnnnnnnnnnnnnnnnnnnnnnnnnnnnnnnnnnnnnnnnnnnnnnnnnnnnnnnnnnnnnnnnnnnnnnnnnnnnnnnnnnnnnnnnnnnnnnnnnnnnnnnnnnnnnnnnnnnnnnnnnnnnnnnnnnnnnnnnnnnnnnnnnnnnnnnnnnnnnnnnnnnnnnnnnnnnnnnnnnnnnnnnnnnnnnnnnnnnnnnnnnnnnnnnnnnnnnnnnnnnnnnnnnnnnnnnnnnnnnnnnnnnnnnnnnnnnnnnnnnnnnnnnnnnnnnnnnnnnnnnnnnnnnnnnnnnnnnnnnnnnnnnnnnnnnnnnnnnnnnnnnnnnnnnnnnnnnnnnnnnnnnnnnnnnnnnnnnnnnnnnnnnnnnnnnnnnnnnnnnnnnnnnnnnnnnnnnnnnnnnnnnnnnnnnnnnnnnnnnnnnnnnnnnnnnnnnnnnnnnnnnnnnnnnnnnnnnnnnnnnnnnnnnnnnnnnnnnnnnnnnnnnnnnnnnnnnnnnnnnnnnnnnnnnnnnnnnnnnnnnnnnnnnnnnnnnnnnnnnnnnnnnnnnnnnnnnnnnnnnnnnnnnnnnnnnnnnnnnnnnnnnnnnnnnnnnnnnnnnnnnnnnnnnnnnnnnnnnnnnnnnnnnnnnnnnnnnnnnnnnnnnnnnnnnnnnnnnnnnnnnnnnnnnnnnnnnnnnnnnnnnnnnnnnnnnnnnnnnnnnnnnnnnnnnnnnnnnnnnnnnnnnnnnnnnnnnnnnnnnnnnnnnnnnnnnnnnnnnnnnnnnnnnnnnnnnnnnnnnnnnnnnnnnnnnnnnnnnnnnnnnnnnnnnnnnnnnnnnnnnnnnnnnnnnnnnnnnnnnnnnnnnnnnnnnnnnnnnnnnnnnnnnnnnnnnnnnnnnnnnnnnnnnnnnnnnnnnnnnnnnnnnnnnnnnnnnnnnnnnnnnnnnnnnnnnnnnnnnnnnnnnnnnnnnnnnnnnnnnnnnnnnnnnnnnnnnnnnnnnnnnnnnnnnnnnnnnnnnnnnnnnnnnnnnnnnnnnnnnnnnnnnnnnnnnnnnnnnnnnnnnnnnnnnnnnnnnnnnnnnnnnnnnnnnnnnnnnnnnnnnnnnnnnnnnnnnnnnnnnnnnnnnnnnnnnnnnnnnnnnnnnnnnnnnnnnnnnnnnnnnnnnnnnnnnnnnnnnnnnnnnnnnnnnnnnnnnnnnnnnnnnnnnnnnnnnnnnnnnnnnnnnnnnnnnnnnnnnnnnnnnnnnnnnnnnnnnnnnnnnnnnnnnnnnnnnnnnnnnnnnnnnnnnnnnnnnnnnnnnnnnnnnnnnnnnnnnnnnnnnnnnnnnnnnnnnnnnnnnnnnnnnnnnnnnnnnnnnnnnnnnnnnnnnnnnnnnnnnnnnnnnnnnnnnnnnnnnnnnnnnnnnnnnnnnnnnnnnnnnnnnnnnnnnnnnnnnnnnnnnnnnnnnnnnnnnnnnnnnnnnnnnnnnnnnnnnnnnnnnnnnnnnnnnnnnnnnnnnnnnnnnnnnnnnnnnnnnnnnnnnnnnnnnnnnnnnnnnnnnnnnnnnnnnnnnnnnnnnnnnnnnnnnnnnnnnnnnnnnnnnnnnnnnnnnnnnnnnnnnnnnnnnnnnnnnnnnnnnnnnnnnnnnnnnnnnnnnnnnnnnnnnnnnnnnnnnnnnnnnnnnnnnnnnnnnnnnnnnnnnnnnnnnnnnnnnnnnnnnnnnnnnnnnnnnnnnnnnnnnnnnnnnnnnnnnnnnnnnnnnnnnnnnnnnnnnnnnnnnnnnnnnnnnnnnnnnnnnnnnnnnnnnnnnnnnnnnnnnnnnnnnnnnnnnnnnnnnnnnnnnnnnnnnnnnnnnnnnnnnnnnnnnnnnnnnnnnnnnnnnnnnnnnnnnnnnnnnnnnnnnnnnnnnnnnnnnnnnnnnnnnnnnnnnnnnnnnnnnnnnnnnnnnnnnnnnnnnnnnnnnnnnnnnnnnnnnnnnnnnnnnnnnnnnnnnnnnnnnnnnnnnnnnnnnnnnnnnnnnnnnnnnnnnnnnnnnnnnnnnnnnnnnnnnnnnnnnnnnnnnnnnnnnnnnnnnnnnnnnnnnnnnnnnnnnnnnnnnnnnnnnnnnnnnnnnnnnnnnnnnnnnnnnnnnnnnnnnnnnnnnnnnnnnnnnnnnnnnnnnnnnnnnnnnnnnnnnnnnnnnnnnnnnnnnnnnnnnnnnnnnnnnnnnnnnnnnnnnnnnnnnnnnnnnnnnnnnnnnnnnnnnnnnnnnnnnnnnnnnnnnnnnnnnnnnnnnnnnnnnnnnnnnnnnnnnnnnnnnnnnnnnnnnnnnnnnnnnnnnnnnnnnnnnnnnnnnnnnnnnnnnnnnnnnnnnnnnnnnnnnnnnnnnnnnnnnnnnnnnnnnnnnnnnnnnnnnnnnnnnnnnnnnnnnnnnnnnnnnnnnnnnnnnnnnnnnnnnnnnnnnnnnnnnnnnnnnnnnnnnnnnnnnnnnnnnnnnnnnnnnnnnnnnnnnnnnnnnnnnnnnnnnnnnnnnnnnnnnnnnnnnnnnnnnnnnnnnnnnnnnnnnnnnnnnnnnnnnnnnnnnnnnnnnnnnnnnnnnnnnnnnnnnnnnnnnnnnnnnnnnnnnnnnnnnnnnnnnnnnnnnnnnnnnnnnnnnnnnnnnnnnnnnnnnnnnnnnnnnnnnnnnnnnnnnnnnnnnnnnnnnnnnnnnnnnnnnnnnnnnnnnnnnnnnnnnnnnnnnnnnnnnnnnnnnnnnnnnnnnnnnnnnnnnnnnnnnnnnnnnnnnnnnnnnnnnnnnnnnnnnnnnnnnnnnnnnnnnnnnnnnnnnnnnnnnnnnnnnnnnnnnnnnnnnnnnnnnnnnnnnnnnnnnnnnnnnnnnnnnnnnnnnnnnnnnnnnnnnnnnnnnnnnnnnnnnnnnnnnnnnnnnnnnnnnnnnnnnnnnnnnnnnnnnnnnnnnnnnnnnnnnnnnnnnnnnnnnnnnnnnnnnnnnnnnnnnnnnnnnnnnnnnnnnnnnnnnnnnnnnnnnnnnnnnnnnnnnnnnnnnnnnnnnnnnnnnnnnnnnnnnnnnnnnnnnnnnnnnnnnnnnnnnnnnnnnnnnnnnnnnnnnnnnnnnnnnnnnnnnnnnnnnnnnnnnnnnnnnnnnnnnnnnnnnnnnnnnnnnnnnnnnnnnnnnnnnnnnnnnnnnnnnnnnnnnnnnnnnnnnnnnnnnnnnnnnnnnnnnnnnnnnnnnnnnnnnnnnnnnnnnnnnnnnnnnnnnnnnnnnnnnnnnnnnnnnnnnnnnnnnnnnnnnnnnnnnnnnnnnnnnnnnnnnnnnnnnnnnnnnnnnnnnnnnnnnnnnnnnnnnnnnnnnnnnnnnnnnnnnnnnnnnnnnnnnnnnnnnnnnnnnnnnnnnnnnnnnnnnnnnnnnnnnnnnnnnnnnnnnnnnnnnnnnnnnnnnnnnnnnnnnnnnnnnnnnnnnnnnnnnnnnnnnnnnnnnnnnnnnnnnnnnnnnnnnnnnnnnnnnnnnnnnnnnnnnnnnnnnnnnnnnnnnnnnnnnnnnnnnnnnnnnnnnnnnnnnnnnnnnnnnnnnnnnnnnnnnnnnnnnnnnnnnnnnnnnnnnnnnnnnnnnnnnnnnnnnnnnnnnnnnnnnnnnnnnnnnnnnnnnnnnnnnnnnnnnnnnnnnnnnnnnnnnnnnnnnnnnnnnnnnnnnnnnnnnnnnnnnnnnnnnnnnnnnnnnnnnnnnnnnnnnnnnnnnnnnnnnnnnnnnnnnnnnnnnnnnnnnnnnnnnnnnnnnnnnnnnnnnnnnnnnnnnnnnnnnnnnnnnnnnnnnnnnnnnnnnnnnnnnnnnnnnnnnnnnnnnnnnnnnnnnnnnnnnnnnnnnnnnnnnnnnnnnnnnnnnnnnnnnnnnnnnnnnnnnnnnnnnnnnnnnnnnnnnnnnnnnnnnnnnnnnnnnnnnnnnnnnnnnnnnnnnnnnnnnnnnnnnnnnnnnnnnnnnnnnnnnnnnnnnnnnnnnnnnnnnnnnnnnnnnnnnnnnnnnnnnnnnnnnnnnnnnnnnnnnnnnnnnnnnnnnnnnnnnnnnnnnnnnnnnnnnnnnnnnnnnnnnnnnnnnnnnnnnnnnnnnnnnnnnnnnnnnnnnnnnnnnnnnnnnnnnnnnnnnnnnnnnnnnnnnnnnnnnnnnnnnnnnnnnnnnnnnnnnnnnnnnnnnnnnnnnnnnnnnnnnnnnnnnnnnnnnnnnnnnnnnnnnnnnnnnnnnnnnnnnnnnnnnnnnnnnnnnnnnnnnnnnnnnnnnnnnnnnnnnnnnnnnnnnnnnnnnnnnnnnnnnnnnnnnnnnnnnnnnnnnnnnnnnnnnnnnnnnnnnnnnnnnnnnnnnnnnnnnnnnnnnnnnnnnnnnnnnnnnnnnnnnnnnnnnnnnnnnnnnnnnnnnnnnnnnnnnnnnnnnnnnnnnnnnnnnnnnnnnnnnnnnnnnnnnnnnnnnnnnnnnnnnnnnnnnnnnnnnnnnnnnnnnnnnnnnnnnnnnnnnnnnnnnnnnnnnnnnnnnnnnnnnnnnnnnnnnnnnnnnnnnnnnnnnnnnnnnnnnnnnnnnnnnnnnnnnnnnnnnnnnnnnnnnnnnnnnnnnnnnnnnnnnnnnnnnnnnnnnnnnnnnnnnnnnnnnnnnnnnnnnnnnnnnnnnnnnnnnnnnnnnnnnnnnnnnnnnnnnnnnnnnnnnnnnnnnnnnnnnnnnnnnnnnnnnnnnnnnnnnnnnnnnnnnnnnnnnnnnnnnnnnnnnnnnnnnnnnnnnnnnnnnnnnnnnnnnnnnnnnnnnnnnnnnnnnnnnnnnnnnnnnnnnnnnnnnnnnnnnnnnnnnnnnnnnnnnnnnnnnnnnnnnnnnnnnnnnnnnnnnnnnnnnnnnnnnnnnnnnnnnnnnnnnnnnnnnnnnnnnnnnnnnnnnnnnnnnnnnnnnnnnnnnnnnnnnnnnnnnnnnnnnnnnnnnnnnnnnnnnnnnnnnnnnnnnnnnnnnnnnnnnnnnnnnnnnnnnnnnnnnnnnnnnnnnnnnnnnnnnnnnnnnnnnnnnnnnnnnnnnnnnnnnnnnnnnnnnnnnnnnnnnnnnnnnnnnnnnnnnnnnnnnnnnnnnnnnnnnnnnnnnnnnnnnnnnnnnnnnnnnnnnnnnnnnnnnnnnnnnnnnnnnnnnnnnnnnnnnnnnnnnnnnnnnnnnnnnnnnnnnnnnnnnnnnnnnnnnnnnnnnnnnnnnnnnnnnnnnnnnnnnnnnnnnnnnnnnnnnnnnnnnnnnnnnnnnnnnnnnnnnnnnnnnnnnnnnnnnnnnnnnnnnnnnnnnnnnnnnnnnnnnnnnnnnnnnnnnnnnnnnnnnnnnnnnnnnnnnnnnnnnnnnnnnnnnnnnnnnnnnnnnnnnnnnnnnnnnnnnnnnnnnnnnnnnnnnnnnnnnnnnnnnnnnnnnnnnnnnnnnnnnnnnnnnnnnnnnnnnnnnnnnnnnnnnnnnnnnnnnnnnnnnnnnnnnnnnnnnnnnnnnnnnnnnnnnnnnnnnnnnnnnnnnnnnnnnnnnnnnnnnnnnnnnnnnnnnnnnnnnnnnnnnnnnnnnnnnnnnnnnnnnnnnnnnnnnnnnnnnnnnnnnnnnnnnnnnnnncatgtttccacttacagatccttcaaaaagagtgtttcaaaactgctctatgaaaaggaatgttcaactctgtgagttaaataaaagcatcaaaaaaaagtttctgagaatgcttctgtctagtttttatgtgaagatatttccattttctctataagcctcaaagctgtccaaatgtccacttgcagatactacaaaaagagtgtttcaaaagtgctcaatgaaaaggaatgttcagctctgtgagttaaatgcaaacatcacaaataagtttctgagaatgcttctgtctagtttttatgggaagataattccgtgtccagcgaaggcttcaaagctttcaaaatatccacttgcaaattctacaaaaagagtgtttcaaagctgctttatcaaaagaaagtttcaactctgtgagttgaatgtgcacatcacaaagaagtttctgagaatgccttcagtctggtttttatgtgaagatattcccttttccaacgaaagcctcgaagctgtccaaatatccacttgtaagtgctgcaaaaagagtgtttcaaaactgctacagcaaaagaaaggtttatctctgtgagttgagtagacacatcaagaagaaatttctgagaatgcttctgtctagtttttatgtgaagatatttcctttgtcaccataggcctccaagccctccaaatgtccacttgcagatgctacaaaaagagtgtttcaaaactgctgtatgaaaagaaatgctcaaatctgtgagataaatgcatacatcacaaagaagtctttgagaatgcttctgtctagtttttatgttaagatatttcctatttcaccatacgtctcaacgcacacaaaatgtacacttgcagatgctacaaagagagtgtttcaaaacttgtagatcaaaacaagtgttcaactttgtgagttgaggacacacatctgaaagaagtttctgagaatgcttctgtctagtttttatgtgaagatattcccgtttccagcgaaagccccaaaactatccaaatatccacttgcacattctacaaaaagagtgtttcaaatctgctctatcaaaataaaggttcaactctgtgagttgactacacacatcacaaagaagtttctaagaatgcttctgtctggtttttatgggaagatatttcctttttcaacataggccttgcagcatctacaaaaagagtttttcaaaactcctctaagaaaaggaatgttcaactccatgagtttaatgcaaagatcacaaagaagtttctgagaatgcttctgtctagttttaacctgaagacagttccgtttccagtgaaggcttgaaagctgtccaaatatccacatgcaaattctcaaaacgagtgtttaaaagctgctctatcactagaaagtttcacctctgtgagctgaatgcacacagaagtttctgagaatgcttctgtctggtttttatgtgaagatattcccgtttccaaccaaagcctcaaagctgtccaaatatccatttgcagatcctacagggagagtgtttcaaaactgctctataaaaagaaaggttctactctgtgagtggagtacacacatcacaaagaagtttctgagaatgcttctgtctagtttttatgtgaaaatagttcgttctccaaaatagtcctcaaagcgctccaaatgtccacttgcagattctacaaaaagagtgtttcaaaactgctctatgaaaaggaatgttcaactctgtgagctgaatgcaaccatcacaaagaattttctgagaatgattctaattattatgtgaagatattcccgtttcgaacgaaggcctcaaagcgctccagatgtccacttgcagattctacaaaaagagtgtttcaaaactgccctatggaaaggaggattcaactctatgagttgaatgcacacatcacaaatggtttttgcgaatgcttctgtctgctttttatgtgaagatatttcctttttcaccataggcctcaaagaaatccaaatatccacttgcagatactacagaaagattgtttcaaaacttctgtttcgactctgtgagttgaatgcacacatcataaagaagtttctgagaatgcttctgtctagtttttttgtgaagatattcccgtttccaaggaaagcctcaaagctgtcctaatatccacttttgaattttacaagtagagtgtttgaaaactgctctgtcaaaagaaaggtttaactctgtgtgttgagggctcacatcacaaagaagtttctgagaatgcttccatctattttttatgttaagatatttcctttttcaccataggcctcaaagcacaccaaatgtccacttgcatattgtgcaaagagtgtttcaaaactgtgctatcaaaagaagcgttcaacactgtgagttgaacgcacacatcacaaagaagtttctgagcatgcttctgtatagtttttatgtgaagatattcccgtatccgaagaaggcctccaggtggtctaaatatttgcacattctactaaaagagtgtttaaaagctgctgtatgataaagtatgttcgaatttgtgagttgaatgcacacatcacaaagaagtttctgagaatgcttctgtctaatatttatgtgaagatattacggtttccaacgaagtcctcaaaaccgtccaaatatccacttgcagattttataaaaagagtgtttcaaagctgctctatcaaaagaaagcttcaacactgtgagtggaatgcacacatcacaaagtagtttctgaaaatgctgctgtctagtttttatgtgaagatattcccatttccaatgaaggccacaaagccgtccaaatatccacttgcagattccactaaaagagtgtttcgaaactgctctatgataaggaatgttcaactctgttaattgaaggcaaacatcacaaagaagtttctcagaatgcttctctctagtttttgtgtgaagatatatccttttccatcataggcctctaagctctccaaatgtccacttgcagattctacaaaaagagtgtttcaaaactgctctctcaaaagtaaggttcaactttttgagtttaatacacacatcacatagaagcttctgagaatgcttccgtctagtgtttgtgttaagatattcccgtttccaacgaaggcttcaaagcggtcaaaatatcctcttgcagatactacaaaaagcgtgtatcaaaactgctccatgaaaaggtatgttcaaccctgtgagttcaatgtaaacatcacaaagaagtttctgagaatgcttgtgtctgtttttttgtgtgaagatgtatccttttccaccatagtcctcaaagctctccaaatgtgcacttgcagattctacaaaaagtgtgtttcaaaactcctctaccaaaagaaaggttcaactctgtgagtttaatgcccagatcacagacaagtttcttaggatgcttctgtctaatgtttatgtgaagatattcccgtttccaactaaggcctcaaagaagtccaaatatccaattgcagattctacaaaaagagcatttcaaaacctctctatgaaaatttatgttcaactctttgagctgaatgcaaagatcacaaagaagtttctgagaattcttctgtctcatttttatataaagatatttccttttccaccattggcctcaaacctctccaaatgtccacatacagattctacaaaaagagtgtttaaaacctgctgtatcaaaagaagggatcaactctgtgagatgaatgaacacatcacaaagaagtttctgagaatgattctgtctagtttttatgtgaagatattcccgtttccaacgaaggcctcaaaggggtccaaatatccacccacagaccgtgaaaaaagagtgattcaaaactgctctatcaaaagaaaggttcaactctgtgagttgaatttacacatcacaaagaagtttctgagaatgctgctatctactctttatgtgaacatattcccatttccaacgaagacctcaaacaattcgaaatatccacttgcagattctactaaaagattgtttcaaaagtgctctcataaggaatgttcaactctgtgaggtgaaagcaaacatcaccaagaagtttctgagaatgcttctgtctagtttttatggaaagatattttcttttccaccgtaggccttaaagcgctccaaatgtccacttgcagatcctacaaaaagagtgtctcaaaagtgctctcataaggaatgttcaactctgtgaggtgaaagcaaacatcaccaagaagtttctgagaatgcttctgtctagtttttatgggaagatatttccttttccaccgtaggccttaaagcgctccaaatgtccacttgcagatcctacaaaaagagtgtctcaaacctactctctcaaaagaaaggttcaactgtgtgagttgaatacacacggcacaaagaagtttctgagaaagattctgtctagcgattatgtgaagatattcccgtttccaacaaaggcttgtaagtggtccaaatatccacttgcagattctactaaaagagtgtttctaaacagctctatgataagatatgcttaactctgtgagttgagaacaaacatcacaaagaagtttctgagaatgcttctgtctagtttttatgtgaagatatttcctttcccaccataggcctcaaagtgctccaaatgtcaacttggagattatgcaaaaagagtgtttccaacctgctctatcaaaagaaatgttcaactctgtgagatgaaagcacatatcacagagaagtttctgagaattcttctgtctggttttaatatgaagatatttccttttccaccataggattcaaagctctccaaatgtccacttgcagattctacaaaaagagtgtctcaaaactgctctatcaaaagaaagggtcaaatctgtgggttgaatgcacacatcacaaagaagtttctgggaatgcatctttctagtttttatgtgaagatattcccgtatccaatgaaggcctcaaagcagtccacatatccacttgcagattctgcaaaaagtgtttcaaaactgctctatcaaaagaaatgttcaactctgtgagttgaatgtacacatcacaaggaagtttctgagactgctgctgtctagtatttatgtgaagatattcccgtttccaatgaaggcctctaggcgttccaaatatccacttgcagattctcctgaaggagtttttcaaaaatgccctgtgataaagtatgaccaattctgtgagttgaatgcaaacatcagaaagaagtttctgagaatgcttctgtatagttttgatgtgaagatatttctttttccaccataggcctcaaagctctccaaatgtccacatgcagattccacgcaaagagtgttgcaaacctgctctatcaaaagaaaggttcagctctgtgagttgaatgcaaacatcacaaagaagtttctgagaaggcttctgtctagcatttctgtgaagatacacccgtttccaatgaaggcctcaaagcggtcgaaatatccacttgcagattctccaaaaagtgtttcaaacctgctctatcaaaagcaaggttcaactctgtgagatgaatgcacacatcacaaagaaatttctgagaatgcttctgtttagtttttatgcgatgatatttccttttctaccagaggcctcaagctctccaaatgtccaaaagcagattttacaaaaagagtgtttcaaaactgctccatcaaaaggaaggttcaactctgtgagttgaatgcaaacatcacaaagaagtttctgaaaatgcttctgtctagtgtttatatgaagatatacccgtttctaacgaaggcctcaaagcagtccaaatatccactagcagaatctacaaaaagagtgtttcaaacctgctctatcaaaagaaaggttcaactctgccaatggaatgcacacatcactaaggagtttttgagaatgcttctgtcaagtgtttatgtgaagatattcacgttgccacgaaggcctcaaagcggtccaaatatccacttgcaaattctactgaaagagtgtttcaacactgctctatgataaggtatgttcaactctgtgagttgaatgcaaacatcacaaagaagtttctgagaatgcttccgtctagtttttatatgaagacatttccttttccaacataggcctcaaaccgccccaaatgtccacttgcagattctacaaaaagagggttttaaacccgctctatcaaaagaaaggttcaactccgtgagttgactccacacagcacaaagaagtttctgagaatgcttctatctcgtgattatgtgacgatattctcctttccattgaaggcctcaaagcagtccaaatatctatttgcagattctactaaaagactgtttcaaaactgctctagataaagtatgttcaactctgtgagttgaatgcaaacatcacaaaatagtttccgagaatgcttctgtctagtttttatgtgaagatatttccttttccaccctaggcctcaaagcgctccaaatgtacacttgctgattctgcaaaaagagtgtttcaaacctgctctatgaaaaggaaggttcaactctgtgagttgaatgcacacatcactaagaagtttctgagaatgcttctgtctagtgtttatgtgatgatattcccgtttccaacgatggcctcaaattagtccaaatatccccttgcagattcctctataagagtgcttcaaaactactctatgataaggtatgttcaactctgtgagttgaatgcacacatcacaaagtagcttctcagaatgcttctatctagtatttacatgaagctattcccttttccaatgaaggcctcaaagaggtccaaatttccacttgcagattctactaaaagagtatttcaaaactgctctatgataaagtctgttcaactccgtgagttgaatgcacacatcacaaagcagtttctcagaatgcttctgtcaaatttttatgttaaggtattttcttttcaactttaggcctcaaagcaatccaaatgtccacttgtagtttctgcaaaagagtgtttcaaacctgctctatcaaaataaaggttaaactctgtgagtttaatgcacacatcacaaagaagtttctgagaatgctttggtctagtttttatgtgaagatactctcctttccaacaaaggcatgaaagcagttcaattacccacatgcagatactactaaaagagtgtttcaaaactgctctgtgataaagtttgttcaactctgagagttgaatgaaaacgtcacaaagaagtttctgagaatgcttctgtgtagtttttgtgagaagatattccgttttccaccattggaatagaagcgctacaaatgtccacttgcagatcctgcaaaaagtgtgtttcatacctgctctatgaaaaggaaggttcaacttggtgagttaaatgcacgcatcacaaagaagtttctgagaatgcttctgtctagtttttgtgtgaagttatttcctttcccaccatatgcctcaaaactctccaaatgcacacatgcagattctgcaaaaagagtgtttcaaacgtgcactatcaaaagttcatctctgtgagttgaatgcacacatcacaaagaagtttctgagaatgcttctgtctagtttttatgtgaaggtattcctgtttctaatgaagacctcaaatcggtccaaatatccacttgcagattctccaaaaagagtgtttcaaaactgctctatgataaggaaagttcaactgtgtcagttgaatgcaaacatcacaaagaagtttcatagaatgcttctgtctagtttttatgagaagatatttcattttccacaataggcctcaaagcaccccaaatgtcaagtttcagattctacaaaaagagtgtttcaaacctgctctaggataaagtatgttcaactctgagaattgaaggcaaacaacaaaaagaagtttctgagaatgctgctgtttagtattaatatgaagatatttccttttccaccataggcatcaaatcgctcataatgtccacttgcagattctgcaaaaagagtgttaaacctgctctatcaatagaaagggtcaactctctgagttgaatgcacacatcaaaaagcattttcctagaatgcttctgtctagtttttatgtgaagaaactactgtttccagggaaggcctcaaagctgtccaaatatccacttgcaaattctacaaaaagagtgtttcaaatctgctccatcaaaagaaaatttcaactctgtgagttgaatgcacacagcacaaagaagtttttgagaaagcttcattgtgtgaagatactcccgtttccaacgaagacctcaaagcagtccaattatacacttgcagatactacaaaaagagtgtttcaaaactgatctatgataaagtatgttaaactcttgagagttgaatgcaaaagtcacaaataagtttatgagaatgcttctgtctagtttttatgtgaagatatttccttttcctccataggacacaaagcactcctaatgtccacttgtagattctgcaaaagagtgtttcaaacctgctctataaaaaaaaaaggttcaactctgcgagttggatacacacagcacaaagaactttctgtgaaagcatcattatgtaaagatactcccgtttccaacgaaggcctcaaagccctccaattatccacttgcagatactactaaaagagtgtttcaaaactgctgtatgataaagtatgttagactctgagaggtgaatgcaaacgtcacaaataagtttatgagaatgcttctgtctagtttttatgtgaagatatatccttttccaccataagcctcaaagagctccacatgtccacttgcggatcctgcaaaaagagtgtttcaaccctgctctatgaaaaggaaggttcaactctgtgagttgaatggacacatcaaaaagtagtttctgagaatgcttctgtctagtttttatgtgaagatattgcagtttccaatgaaggcctcaaagcggtccaaatatccacttgcagattctacgaaaatagtgtttcaaaactactctatgaaaagggaggttcaactctgtgagttgaatgcaaacatcacaaagaagtttctgacattgcttctgtctagtttttatttatagacatttccttttccaccataggcctccaagctctccaaatgtctgcttgcagattctacaaaaaaagtgcttcaaacctgctctatcaaaagaaaggttcaattttgtgactggaatgcacacatcacaaagaggtttctgagaataattttgtctagtgtttatgtgaagatatccccttttccaacgaaggcctcaaagcggttcaaatatccacttgcagattctacaaagagagtgtttcaaacctgctctatcaaaaggaaggttcaactctgtgagttgaatgcacacagttcaaaaaagtttttgagaaagcttctgtctagtgattatgtgaagatattcccctttccaacaaaggtctcaaagtggtccaaatattcacttgcagattctacaaaaagagtgtttcaaaactgctctatgaaaaggtgtgttcaactctatgagttgaatgcaaacatcacaatgtagttccttagaattcttctgtctggtttttatttacatatatttccttatccaccataggcctcatagctctaaaaatgtctggtgccgattctacagaaagagtgtttcaaacatgctctatcaaaagaaagattcaactctgtgagttgaatgcacatatcacaaagaattttcggagaatgcttccgtctagtgtttatgtgaagacattcccgtttccaaagaaggcctccaagcggtccaaatatacatttccagattctacaaaaagagtgtttcaaaactgctctatcaaaagaaaggtacaactttgtgagtagaatgcacacatcacaaagaagtttctgagcatgcttctctctagtttttatgtgaagatatttacttttccacctcaatgctctcaaatgtccacttgcagattctacaaaaagagtgtttcaaacatgctctatcaaaagaaagtttcaactcttggggttgaatgcacacatcacaaagaagtttctgagaatgattctgcctgtttttgtgtgaacatattcccgtttccaacaaaggtctcaaagcgtttcaaatatccacttgcatattctacgaaaagagtgtttcaaaactgctctatggaaaggtatcttcaactctgtgagttgaatgcaaacatcataaagaattttctgagaattcttctctcttatttttatatgaagatataaccttttccaccataggcctcaaagctctccaaatgtcaacttgcagattctacaaaaagagtgtttcaaagctgctctatcaaaagaaaggttcgactctttgagtttaatgcacgcatgacaaagaagtttttgagaatgcttctgtctagtgtttatgtgaagacattcccgtttccaatgaaggcttcatagcagtccaaatatccacttgcagattctataaaaagagtgtctcaaaattgctccaagggaaggtaccttcaattctgtgagttgaatgcaaacatcacaaagacgtttctgagaacgcttctgtctagtttttgtgtgaagatatttccttttccaccataggactcaaagctctacaaatgtccacttgcagatactaagaaaaaaatgtttcaaacctgctctatgaaaagagaggttcatctctgtgagttgaatgcacacatcacaaagaagtttctgagaacgtttctctctagtttttatgtgaagatacttccttttccaccataggcctcaaagctctccaaatgtccacttcagattctacaaaatgaatgtttcaaacatgctctatcaaaagaaaggttcaactctgtgagttgaatgcacacatcacaaacaagtttatgagaatgcttccgtctagtttttatgtgaagatatatccttttccaccataggactcaaagagctccaaatgtccacttgcagatcctgcaaaaagagtgtttcaaccctgctctatgaaaagaagggttcaattctgtgagttcaatgcatacatcaaaagtagtttctcagaatgcttctgtctagtttttaatgtgaagatattcccgtttccaatgaaggcctcaaagcagtccaaacatccacttgcagattataagaaaagagtgtttcaaaattgctctatgaaaaaggaggtttaactctgtgagttgaatgcaaacatcacaaagaagtttctgaaaatgcttctgtctagtttttatttatagatatttccttttccaccataggcctgaaagctctcgaaatgtgcacttgcagattctaccaacagagtgtttcaaagctgctctatcaaaagaaaagttcaactctgtgagttaagtgcacacattacaaaggggtttctgagaatgcttctttccacgttttatgtgaagatagttccttttccactatagacctcaaaacactccaaatgtccacttgcagattctacaaaaagattgtttcaaagctgctctatcaaaagaaagtttcaaatccgtatgttcaatccacacagcacaaagatgtttctgagaaagcttctgtctagtgattatgtgaagatactccagtttccaaggaaggcctcaaagctgtccaaatatccacctgcagattctactaaaagagtgtttcaaaactgttctaagataaagtctgttcaactccatgagttgactacacacatcacaaagtagtcttagagaatgcttctgtatactttttatgtgaagatatttccttttccaccgtaggcatcaaagggctcgaattgtccacttgtaggttctgcaaaagagtgtttcaaacctgctctataaaaacaaaggttcaactctgtgagtttaattcgcacataacaaagaagtttctcagaatgcttctgtctagtttttatgtgaagctatttccttttccaccataggcctcaaagcagttcaaatgtcaacttgtagatacaaaaagagtgtttcaaaacttctctatgaaaaggaaagtttaactctgtaagtttaatgaaaacaccacaaagaagtttctgagaatgcttctgtctagtttttatgtgaagatatttccttttccaccataggcctcaaatcgctccaaatgtccacttgcagattctacaaagagagtgtttcaaaccggctctatcaaaggaaaggttcaactctgtaatttgaatgcacacatcacaaaggagtttctgagaatgcttctctctagtgtttatgtgtagatattcctgtttccaatgaaggccacaaagcggtctaaatatccacttgcagattctacaaaaagtgtgtttccaaactgctccataaaaatgtatgttcaactctgtgagttaaatgcaaacatcctgaagaagtttctgagaatgcttctgtctagtttttgtgtgaagatatttccttttccaccatatgcctcaaagctctccaaatgtcaacttgcagattctacaaaaagagtgtttcaaacctgctctatcaaaagaaaagttcaactctgtgagttgaacctcactaagaggtttcagagaatgcttctgtctaatctttatgtgaaggtattcccgtttccaacgaaggcctcagagcggtccaaatatccacttacgaagtctactaaaagagtgtttcaaaactgctctatgataagatatgttcaaatctgtgagttgaatgcaaacatcacaaagaagtttctgagaatgcttctgtctagtttttatgtgaagttatttccttttccaccattggcctcaaagcactgcaagtgtccacttgcagattctacaaaaagagtatttcaaacctgctctatcaaaagaaaggttcaactctctgagttgaatgcacacttcacaaagaagtttccgagaattcttctgtctggtttttatgtgaaaatatttccatttccaccataggcctcagagcgatcaaaatgtccacttgcagattatacaaaaacagtgtctcaaaactgctctatcaaaaagaaggttcaactctgtgaattgaatgcacacatcacaaagaagtttctgagaatgcttctgtctagtgtttatgtgaaggtattcccatttcccctgaaggcctcaaagcactccaaatatccacttgcagattctacaaaaagtgtgtttcaaaattgttctgtcaagaggaatggtgaactctgtgagttgaatcacaaatcacaaagaagtttctgagaatgcttctgtctagtttttgtgtgatgatatttccttttctaacataggcctcagagcagtccaagtatccacttgcagattctacaaaaagagtgctgcaaaactgctctgactaaaggaatgttcaactctttgagttgaatgcacacatcacaaagtagtttctgtgaatgcttctatctagtttctgtgtgaacatatttccttttctaccataggcctcaaagtgctccaaatatccacccgcagattctacaaaaagagtgtttcaaaactgctctaccaaaaggaagtttcaagtctctgagtttaatgcacacagcacaaagaagtttctctgactacttctgtgttgtttttatttaaagatatttccttttccaacacagggcccaaagggctccaaatatccacttgcagtttcttcaaaaaagagattctaaactgaccaatcaaaagataggttcatctctgtgagttgaatgcatacatcacaaagcagtttctctgaatggttctgtgtagttttaattaaagataattccttttccaccatagggcacaaatggctccaaatatccacttgtagattctacaaaaccagagattcaaaactgctcattgagaagataatttcaactcagtgatttgaatgtacacatcacgaagaagtttcttagaatgcttctgtgcagtttttattgacgatatttcctttttcaccatagggcgcatagggctccaaatatcctcttgcagagtctagaaaaagagaaactctaaactgctcaatcaacagataggttcaactctgtaagttgaatgcccacatcacaaagaagtttctcagaatgcttctgagtagtttttatgtgaaggtgtttccttttccacaataggcctcaaagttctccaaatatccacttgaagattctacaaaaaaggtgtttcaaaactgcgcaatgaaaagaaaggttcaaccctgtgagatgaatgcacatatcacaaagaagtttctcagaatgcttctgtgttgtttttatgtgaagatatttccttaccactatgggcctcagtgggctccaaatatccacttccatattctacaaaaagagtgtttcaaaactgctcaatcatgagacaaaattcatccctgtgagatgaattcacacgtcatgaagtagtttctcagaatgcttctgtgtaatttttatgtgaggatatttgcttttccacaataggcctcaaggggctccaaatatccacctgcagattctgcaaaaagagaggttcaaaactgctcaatcaaaagatactttcaactctgtgagttgaatgcacacatcacaaagaagtttgtctgaatgcttctgtgtagtttttatttcaagattttccttttccaccatagggctcaaagggctccaaatatccacttgcagattctacaaaaagagagattcaaaactgctcaatgagaagataagatcaactctgtgagttgaatgcacacctcacaaagaagtttctcagaatgcttctgtgtagtttttatgtgaagatatttccttttccacaatagtcctcaaagctctccaaacatccactaacagattctgcaaaaagagagattcaaaactgctcaatcaaaaggttcaactctgtgagttgaatgcaaacatcacaaagaagtttctcagaatgcttctgtgtagtttttatgtgaacatatttgattttccacagtaagcctcaaaaggctccaaatatccacctgcagattctgcaaaaagaggtattcaaaactgctcaatcaaaagataggatcaactctgtgagttgaatgtatataccacaaagaagtttctctgaatggttctgcatagttttatttgcagatatttccttttccacaatagggtgaaagggctccaaacatccacttccagattctacaaaacagagattgaaaactactcaatgagaagataagttcaactcagtcagttgaatgcacacatcatgaagaagtttcttagaatgcttctgtgtagtttttattgaagatatttccttttcaaccatagggtgcaaagggctccaaatatccacttgcagattctagaaaaagagtgactctaagttgctcaatcaaaagataggttcaactctgtgagttgaatgcccatatcacaaagaagtttctcagaatgcttctgtgtagtttttatgtgaagatatttccttttccaccataggcctcaaagctctcccaatatccacttgcagattctgcaaagagagattcaaaactgctcaattgaaagacaggttgaactctgtgagttgaatgcacacagcacaaagaagtttctcagaatgcttctctgtagttcttatgtgaacataattgattttccacagtaggcctcacagcactccaaatttccacttgcagattctacaaaaagagagattcaaaactgttcaatcaaaagataggttcaactctgtgagttgaacgcatacatcgtgaagaagtttctcagaatgcttctgtgtagttcttatttgaagatatttggttttccactgtaggcctcaaagcgctccaaatatccacttgaagatcctacaaaaagagtgtttcaaaactgctcaatcataacctaggttcaaccctgtgagatgaatgcacacatcacaaagcagtttctctgagtgattctgtatagtttttatttgaggatatttccttttccatcatagggtgcaaagggctccaaatatccacgtggatattctaccaaaagataaattcaaaaattgctcaatgagaagataagttcaactctgtgagttgaatgcacacctcacaaagtagtttctcacaatgcttctgcatagtttttatgtgaagatatttgcttttccactgtaggcctcaaagggctcgaaatatccaccttcagatagtgcaaaaagagagattcaaaactgctcaatcaaaagatagcttcaactctgtgagttgagtgcacatatcacaaagaagtttctctgaatgctactgcatagtttttatttcaagatatttccttttccaacatagggcgcaaaggtcttcaaatatccacttgcagattctacaaaaagagagattgaaaactcctcaaagagaagataatttcaactctatgagttgaatgcacacctcacaaagtagtttctcagaatgcttctgtgtagtttttacgtgaagatatttccttttccacaataggcctcaaagctttccaaacatacacttgtagtttctgcaaaaagagagattcaaaactgctcaatcaaaacgtagtttcaactctgtgagttgaatgcaaacatcactatggtgtttctcagaatgtttctgagtagtttttatgtgaaggtatttccttttccacaataggcctcaaaaggctccaaatatccacttgcagattccacgaagagagtgttccaaaactgctcaatcaaaagaaagtttcaactctgtgagatgaatgcacacatcgcaaaggagtttctgaaatttcttccttctagattttatgtgaagatatttccttttctatcataggccgcaaagcgctccaaatgtccacttgccgattctacaaaaagggtatttccaaactacacaatcaaaagaaagtttcaactctgttagctcaacgtacacatcataaaaaagattatcagaattcttctgtttttttgtgtgaagatatttccttttccaacttaagcctcaaggtgcttgaaatgtccccttgcagattctccaaaaagagtatttgaaaactggttctcctaaagaaagttggaactccaggggatgaatgcagacatcacacagaactttctcagaatgcttctatctactttttatgtgaagatatttccttctccaccacaggcctcaaagccctgccaaatgtccacttgcagatcctacaaaaagagagtttccaatctgctcaatcaaaagaaaggtttaactccgtgagattaatgcacgcatcacaaagaagtttctcagattgcttctgtctagattttatgtgaagatatttccttttctaccattggccgcaaagagttccaaatgtccacttgcagattctacaaaaagagtgtttccaaactacttaatgaaaagaaacgttcaactccgtgagatgaacacactcatcacaaagaagtttctcagaattcttctaatttttatgtgaagatatttcctgttccaccataggcctgaagacactctaaatgtccgcttgcagattctacaaaaagagagtttcaaaactgctcaatcaaaaggaagggttatctctgtgagatgaatgcatatatcacaaacaagtttctcatatttcttctgtctagattttacgtgaagatatttacttttctaccatagaccgcaaatcgctccaaatgtccacttgcagactctacaagaaatagtggtaccaaactgctcaattgaaagaacggttccactctgtgagaagaacgcacacatcacaaagaagtttgtcagaattcttctttctagtttttatgtgaagatatttccttttccaccataggcctcaaagcgttcaaaatgtccacttgcagattctacaaaaagagagtttcaaaactgctgaatcaaaagaaagtttaaactctgtgagatgaatgcacccatcactaagaagtttctccgattgtttctctctagattttatgtgaaggtattactttttctaccataggtcgcaaagcgcttcaaatatccatttgcagattctacaaaaaagagtgtttccaaactgctcaatcaaaagaaaggttcaagtctgtgagatgaatgcacacattcccaagaagtttgtcagaattcttctgtctagtttttatgtgaagatattaccttttccaccataggcctcaaagcgctccaaatgtccacttgcagattctacgaaaagagagtttcaaaactgctcaatcaaaagaaaggtttaactctgtgagatgaatgcacacatcacaaagaagtttctcagattgtttctgtctagattttatgtgaagatatttctgtttcaacaataggccgcaaagcgttgcaaatgtccacttgcagattctacaaaaagagtgtttccaaactgctcaatcaaaagaaaatttcagctttgtgagatgaacgcacacatcacaaagaagattatcagaattcttctgtctagtttttatgtgaagctatttccttttccaccataggcctctaaacgctccaaatgtccacttcgagattctacaaaaagagtgtttccaaactgctcaatcaaaagaaaagtttaactctgtgagatgaatgcacacatcacaaataagtttctcagatgggttctgtctagattttatgtgaagatatttccttttctaccatatgccacatagttctccaaatgtccacttgcatattctacagaaagagtgtttccaaactgttcaatcaaaagataggttcaaatctgtgacatgaatgcacacgtcccaaagaagtttctcagaattcttctgtctagtttttatgtgcagatatttccttttccactgttggcctcaaagaactccaaatatccactagcagattctacaaaaacagaacttcaatactgctcaatcagaagaaaagtttaactccatgagatgaatgcacacatcacaaagaagtttctcagatttcttctgtctagactttatgtgaagatatttccttttctactactggactcaaagcgctccgaatgtgcacttgcagattctacaaaagagtgtttccaacctgctgtatcaaaagaaagtttcaactatgggggatgaaagcacgcatcacaaagaagtttttcagaattcttctgtctagtttttatgtgaagaggtttccttttctaccacaggcctaaaagggctcgaaatgtccacttgcagatactacaaaaagagagtttcaaaactgctcaataaaaagaaaggtttaactctgtgagatgaatgcacacatcacaaagaagtttgtcagattgcttctgtctagattttatgtgaagatatttccttttctaccaaaggccgcaaagcgctaaaattgtgcacatgtagattctacaaaaagagtgtttccaaacagcccaatgaaaagaaactttcaactctgtgtgatgaatgcacgcatcacaaagtgatttcatagtattcttctgtctagtttttatgtgaagatatttccttttccaccacagttctcaaagagcttcaaatgtccacttgcagattgttcaaaaagtgtgtttccaaactgctcgatcaaaaaaagcttaactctgtgagatgaacacacacgtcacatagatatttctcagatttcttctgtctagtttttatgtgaatgtatttcattttccacggtaggcctcaaggggcttgaaatgtccacttgcagattccacaaaaagagtaataaataactggcccatcaaaagaaaggttcaaatctgggagatgaatgcacatatcacaaagtagtttctcatattgattctatctaatttttatgtgaatatatttccttttccaccataggtctcaaaccgctccaaatgttcacttgcagaatctacaaaaagagagtttcaaaactgctcaatcaaaagagaggtttaactctgtgagatgagcgtgcgcatcacaaagaagtttcccagattgcttctgtgtagattttatgtcaagatatttccttttctaccattggctgcaaagtgctccaaatgtccacttgcagattctacaaaaacagtgttttcaaaaggctcaataaaaagaaaggttcaactctgtgagatgaacgcacacatcacaaaggagtttctcagaattcttctgtctagtttttatgtgaagatatttccttttccaccaagagcctgaaagagctccaaatgcccaatttcagattcaacaaaaagagagattcagaactactcaatcaaaggaaagttttaactctgagagataaatgcacacatcaaaaagaagtttctgagattgcttctgtctagatttaatgtgaagatatttccttttctaccataggccacaaagtgcaccaaatgtccacttgcagattctacaaaaagagtgtttccaaactgctcaatcaaaagaaaggttcaactctgtgagatgaatgcacacatcagaaagaagtttctcagattgcttctgtctagattttatgtgaagatattccctgttctacaataggctgcaaagcgctcctaatttccacttgccgattctataaatagagtgtttccaaactgctcaatcaatagaaagtttcaactctgtgagatgaacgcacacatcacaaagaagtttctcagattgcttctgtctagattttatgtgaagatatttcttttttctaccataggcctcaaagcgctccaaatatccacttgcacattctacaaaaagagtgttttcagacagctcaatccaaacaaaaattcaactctgtgagatgaacgcacacatcagaaagaagtttctcaaaatgcttctatctagtttttatgtgaagatatttccttttccaccataggcctcaaagaactccaaatgtccatttgcagattctacaaaaagagagtttcaaaactgctccatcaaaagaaaggttttactctgtgaaatgaattcacacatcacaaagaagtttctcagattgcttctgtctagttcttaggtgaagatatttccttttccaccacaggccttaaagcgctccaaatgtccacttgcagattctacaaaaagagagtttgaaaactgctcaatcaaaagaaagttttaactctttgagatgaaaggacacaccacaaagaagtatctcagattgcttctgtctagattttatgtgaagacattttctattctaacataggctgcaaagagctctaaatatccacttgcagatccttcaaaaacagtatttccatactgctcaatgaaaagaatgattcaacactgcaagatgaaggcacgcatcacaaggaaggttctcagaattcttcagtctggtttttatgtgaagataattgccttttccaacataggcttcaaaggcctccaaatgtcaacttgcagattctccaaaaagagactttcaaagccgctcagtcaaaaaatgtttaattctgtgagttaaattcacacgtcacaaagaattttctcaaatttcttctttctagattttatctgaagatatttccttttccagcatgggcctcaaagtgttccaactgtccacttgcagattctgcaaaaagagagtttcaaaactgctcaatcaaaagaaaggtttacctctttgagatgagtacacacataacaaagaagtttctcagattgcttctgtctagattttatgtgaagatatttccttttctactataggccacaaagtgctgaacatgtccacttgcagattctacaaaaaaaaattttccaaactgctcaatcaaaagaaaggttcaactctgtgagatgaacgcacacatttcaaagaagtttctcagaattcttctgtctagcttttatgtgaagatacttcattttccaccacaggcctcaaggcgcttgaaatgtccacatgcagattccacaaaaagagtatttcaaaactggtccatcagaggaaaggtacagacagctctgttgaatgaatgcaccctaaaaagaattttctcagattgcttctgtctagattttatgtgaatatattcccttttctaccataggccgcaaagcgttccaaatgtccacttacagatactacaaaaagagtgttttcaaactgctcaatcaaaagaaaggttgaactctgtgagatgaacccaaacatcacaaagaagtttctcagaattcttctgtctagttgttacttgaagatgtttccttttccaacatagaagtttttcagattgcttctctctagattttatgtgaagatatttctttttccaccgtaggcctcaatgcattccaaatgtcaacttgcagattctacaaaaagagagtttcaaaactgctcaaaaaaagaaagatttaactctgtgagatgaacactgcttctgtctagattttatctgaagacatttcctgttctaccataggtcgcaaagcactccaaatttccacttgccgattccacaaaaagagggtctccaaacagctcaatgaaaagaaagtttcaactctgtgagatgaaaggacacatcacaaggaagtttctcagattgcttctgtctagattttatatgaagatatttcttttttctaacataggctgcaaagcgttccaaatgtccacttgcagatttttacaaaaagagtgtttccaaactgctcaatcaaaagaaaagttcaactctgtgagatgaacgcacacatcacaaatacgtttctcagaattcttctgtcttgtatttatgtgaaaatatttccttttccagcataggcctcaaagccctccaaatgtccactttcagattctacaaaaagagagattcaaaagtgctcaatcaaaagaaaggttttactgtgtgagatgaatgcatacattgtaaagaagtttctcagattgcttctttctagattttatctgaggatatctccttttccaccatatgcctcaaagtactccaaatgtccactttcagattctacaaaaagagagtttcaaaacttctcaatcaaaggaaaggtttaactctgtgagatgaatgcacacatttaccaagaagtttctcagatttcttctgtctagattttatgtgaagatatttccttttctaaaataggccgcaaagcgctccaaatatccacttgcagattctacaagaagagtatttccaatgtgctcaatcaaaagaaatgttcaaccctgttagatgaatgcacacatagcaaagcaatttctcatattacttctgtctagattttacgtgaagatattccttttttctaccataggctgcaaagagctccagatgtccacttgcaaattctagaaaaagagtgttttcaaactgctccatccaaaaaaagttcaactctgtgagatgaatgcacacatcacaaagaagtttctcagaattcttccgtctagtttttatgtgaagatatttccttttccaccgtaggcctcaaagcgctccaaatgttcacttccagattttaaagacagagtgtttccaaactggtcaatcaaaagaaaggttgaactctgtgagatgaactcacgcatcaaaaagaagtttgtcagaattcttctgtctagtttttatgtgaagatatttccttttctaccataggccacaaagcactacaaatgtccaattgcagattctacaaaaagagattttcaaaactcctcaaccaaagagaattttaactctgtgagacgaatgcacacatcacaaagaagtttctcagattacttctgcctagattttatgtgaagatatttccttttctaccacaggccgcaaagctctccaaatgtccacttgaagattcaacaaaaagaatgttttcaaactgctcaaacaatagaaattatcaactctgtgagatgaaagcatgcatcaccaagaggtttctcagaattcttctattttttatgtgaagatatttccttttccaccataggcctcaaagtgctccaaatgtccacttctagattctacagaaagagtgtttccaaaatgctcaatcaaaagaggtttaaatctgtgagatgaatgcacacatcacaaagaagtttctaagaatgcttctgtctagattttatgtgaggatatttccttttctaccataggctgcaaaacgcttcaaatgtccacttgcagatactacaaaaatagtgtttccaaacagctcaatcaaatgaaagtatcaactctgtgagatgaacccacacatcacaaactgctttctcagaattcttctgtctagtttttatgggaagatagttccttttccaccataggcctcaaagcgctccaaatatccactagcggattctacaaaaagagtgtttcaaaactgctcagtcaaaagaatgattaactctgtgagatgaatccacacatcacaaagaaatttctcagattccttctgtctagattttatgtgaagatatttccttttctaccataggccacaaagagctccaaatttccacttgcagaatctccaaatgagttgtttccaaactgcagaatcaaaagaaagtttcaactctgggagttgaacactcgcatcacaaagaggtttctaataattctgtctagtttttatgtgaagataattccttttccaccataggttgcaaagcgctccaaaagtccacttgcagattctactgaaagaatgtttccaacagctcaatcaaaagaaaagttcaactctgtgagatgaatgcacacatcacaaagaagtttctcaggattcttctgtctagtttttatgtgaagatatttccttttccaccattgaactcaaagcactgcaaatgtccacttgccgatcctaaaaaatgattttccaaactgctcaatcaaaagaaaattttaactctgtgagatgaatgcacacaacacacagaagtttctgagattgcttctgtctagattttatgtgaagatatttgctgttcttccgtaggccacaaagccctccaaatgtccacttgcagattcgacaaaaagagtggttgcaaagtgcttaatcaaaagaaaggttcaactctgtgagattaatgcacgcatcacaaagaagtttctcagatttcttctgtctggtttttatgggacgatatttccttttccaccattggacacaaagggctccaaaagtccacttgcagattttacaaaaacagagtttcaatacacctcaatcaaaagaaagttttaactctctgggatgaatgcacatatcacaatatcacaaagatgcttctcagattgcttctgtcaagattttatatgaagatatttccttttctaccatagggcgcaaagcactccaaatgtccagttgcagattctacaaaaagagagtttcaaaactgctaaatcaaaagaaacttttaattctgtgggatgaatgcacacatcacaaagaagtttctcagattgcttctgtctagattttatatgaagatatttccttttctaccattggctgcaaagctctccaaatgtccacttgcagattctacaaaaagagtgtttccaaactgctcaatctaaggaaagttccaactctgtgagatgaacgcagacatctcaaagaagtttctcagaattcttctgtgtagtttttatatgaaagtattaacttttccaccacatgcatcaaatcgctccaaatgtccacttgcagattctacaaaaagagagtttcaaatctgctctatcaaaagaaaggtttacttctttgagatgaatgcacacatcacaaagaagtttctcagtttgcttctgtctgcaatttatgtgaagatatttcctgttctaacatagacctcagagcactccaaatgtccacttgcagattctaccaaaagagtgtttccaaactgctcattcaaagaaatgttcaactttctaaatgaatgcacacatcataaagaactttctcagaattcttctgtctagtttttatgtgaagataacaccataggcctcaaagccttcaaaatgtccagttgcagattctacaaaaagagggtttccaaagtgctcagtcaaaagaaaggtttactctgtgagatgaatacacacaccacaaagaagcttgtcaggttgcttttatctagattttatgtgaggatatttccttttctaccataggcaacaaagcactccaatagtccacttgcagattctacaaaaagaatgtttctaaactgctcaatcaaaaggaagattcaactttctgagataaactcatacatcacaaaggagattctcagaattcttctgtcaagtttttatgtgaagatatttccttttccaccataggactcaaaactatccaaatgtccacttgcaaattctacaaacacagagtttcaaaactgctcagtcaaaagaaagtttgaactctgtgagatgaatgcacacatgccaaagaagtttctcagattccttctgtctagattttttgtgaagatattaccttttctaccatagtccgcatagcgctgaaaatgtccacttgcagaatctccaaaaacagtgtttccaaactggtgaatcaaaagaaagtttcaactatttgagttgaaggcacacatcacaaagaagattctgagaatacttctgtctagtttttctgtgaagatatttccttttccactataggcccaaaagcgctacaaatgtccactagcggattctacaaaaagagtgtttcagaacttctcaatcaaaagaaaggtttaactctgtgagttgaatgtacacatcacaaagaagtttctgagaatgctgctgtctagattttatatgaagatattctcgtttccaaggagggcctcaaagggtacctaatatccacttgcagattctactaaaggagtgtttcaaaatgactctatgataaggtatgttccactctgtgagttgaaggcaaacatcaaaaagaagtttctgagaatgcttctctctagtttagatgggaagatacttccttttccactataggcctcaaagtgttccaagtgtccacttgcagattctacaaaaagagtgtttcaaaactgctctatcaaaagaaagtttcaactctgtgaagtgaatgcacacattacaaacaagtttctgagaatgcttctgtctagtttttatgtgaagatattcccgtttccaacgaaggcctcaaagcagtccaaatatccactagcatattctacaaaaagagtgtttcaaaactgcccccatgaaaatgaatattcaactctgtgagtagaatgcaaacatcacaaagaagtttctgagaatgcttctgcctagtttttatgtgaagatatttcctttcccaccataagccccaaagcgctccaaatgtccacttacagaatctacaaaagagtgtttcaaacctgctctatcaaaagaaaggtacaactctgtgaattgaatgcaaatatcacaaagaagtttctgagaatgcttctgtctagattttatgtgaagatatatccttttctaacttaggctgcaaagcgcttcaaatgtctacttacagaatctacaaaaagagtttttccataattctcaatcaaaagaaagtttcaactctgtgagataaacgcacacatcacaaagaagtttctcagaattcttctctctagtttttatgtgaagatatttccttttccaccataggcctcaaagcactccaaatgtccacttgcagattctacaaaaaaagaggttcaaaactgctcaatcaaaagaaaggtttaactctgtgagatgaatacacacatcacaaagaggtttctcacattggttctgtctagattttatgtgaagatatttcctttaataacaggtcgcaaagccctcctaatgcccacttgcagattctacaaaaagagtgtctgtaaactgctctatcaaaaggaagtttcaactctgtgagaagaactcacatatcacaaagaagtttctcagaattcctctgtctagtttttatgtgaagatatttcctttcccaccataggcctcaaagtgctccaaatgtccacttgcagattctacaaaaagaatgtctcaaacctgctctatcaaaagaaaggttcaactcagtgagttgaatgcacacagcacaaagaagtttctgagaaatcttctgtctagtgattatgtgaagatattcccgtttccaatgaaggcctctaaccggtccaattaaactcgtgcagattctactaaaagagtgtttcaaaactgctctatgaaaaggtttgttcaactctgtgagttgaaggcaaacatcacaaagaagtttctgagaatgcttctgtggttttcatgggaagatattttcttttccactataggtatcaaattgctcaaatgtccacttgcagagtctacaaaaagattgttttaaacctgttctatcaaaagaaagtttcaactctgtgagttgaatgcacacagcacaaagaactttatgagaaagcttctgtctagtgtttatgtgaagatattcccgtttccaaggaatgcctcaaagcggtccaaatatccacttgcagattctactaaaagagtgactcaaaactgctctatggtaaagtattttcaactctgtgagtggaatgcaaacatcacaaagacgtttctgagaatgcttctttctagtttttcagtgaagatatttccttttccactataggcctcaaagcgttccaaatgtccacttgcagattctgcaaaaagagtgtttcaaatctgctctatcaaaagaaaggttcaactctgtgagttgaatgcacacatcacaaagaagtttctgagtatgcttctgtctagtttttctgcgaagatatttccttttacaccataggcctcaaagttctccaaatgtccccttgcagattatacaaaaagaatgtttcaaaacagctctatcaaaagaaacgttcaacgatgtgaggtgaatgcacatatcacaaagaagcttcagagaatgcttctgtctggttcttatgtgaagatatttctttttccacaataggcatcaaagctctccaaatgtccagttgcagattctacaaaaagagtgtttcaaaactgacctatcaaaagaaagggtcaactctgtgagttgaatgcacacatcacaaagaagtttctgagaatgcatctgtctagtttttatgtgaagacattcccgtttccaacgaaggcctcaaagcagtccaaatatccactaggagattctacaaaaacaatctgtcaaaactgctccatgaaaacgtgtgttcaactctgtgagttgagtgcaaacatcacaaggaagtttctgagaatgcttgtgtctagtttttatgcgaagataattcctcttccaccatagacctcaaagccttccaaaggtccacttgcagattctacaaaaagagtgtttcatacttggtctatcaaaagaaaggttcaaatctgtcaattgaatgcacacctcagaaagaagtttctgagaatgcttctgtctagtgtttatgtgaagatattcccttttcctaagaaggcttcaaatcggtccaaatatctacttgcaggttatacgaaaagagtgtttcaaaactgctctatgaaaaggaaggttcaactctgtgagttgaatgcaaacatcacaaagaagtttgtgagaatgcttctatctggtttttatgtgaagatatttccgtttctaccataggcctcaaagctctcaaaatgtccacatgcagatactgcaaaaagtgtttcaaatctgctctatcaaaagaaagtttcaagtctgtgagttgaatgcacacatcacaaagaagtttctgagaatgcttctgtctagtttttatgtgaagatatttcctttaccaccataggcctcaaagctctccaaatgtccacttgcagattctacaagaagagtgtctcaaacctgctctatcaaaagaaaggttcaactcagtgagatgaatgcacacatcaaaaagaagtttctgagaatgcttctgtctagttttaatgtgaagatattcccgtttccaatgaaagcctcaaataagtccaaatatccactagcagattctgcaaaaagagtgtttcaaaacttctcaatcaaaagaaaggttcaactctttgagatgtacgcacaaatcacaaagaagtttctcagtattttttgtctagtttttatgtgaaaatatttacttttccactgtaggcctcaaagcgctccaaatgtcaacttgcagattttacaaaaagagagtttcaagacagctcaatcaaaagaaagttttaactctgtgagatgaatgcacacatcacaaagaagtctctcagattcatcctatctagattttatgggaatatatttccttttctaacataggctgcaaagcgctctaaatgtccacttgcggattccacaaaaagagtgtttccaaactgcttaatcaaaacaaaggttcaactctgtgagataaacgcatgcatcacaaagaagcttctccgaattcttctgtgtagttttgatgtgaaaatatttccttttcctcctcaggcctaaaagcgctccaaatgttttcttgcagattctacaaaaagagagattcaaaactgctcaatcaaaacaaaggcttaactctttgagatcagtgcacacttcacaaagaagtttctaaaaatgcttctgtctagtttttatgtgaagatatttcattttccaccgtaggcctcaaagcactccaaatatccacttgcacattcaacaaaaagagagtttcaaaactgctcaatcaaaagtaagagttaactctgtgagatgaatgcacacatcccaaagaagtttctcagattgcttctgtctagattttatgtggagctatatccttttcttttttttttttattatactttaagttttagggtacatgtgcacattttgcaggttagttacatatgtatacatgagccatgctggtgcgctgcacgcactaactcatcatctagcattaggtatatctcctgatgctacccctcccccctccccccactccaaaacagtccccagattgtgatattccccttcctgtgtccatgtgatctcattgttcaattcccacctatgagtgagaatatgcggtgtttggttttttgttcttgtgatagtttactgagaacgatgatttccaatttcatccatgtccctacaaaggacatgaactcatcattttttatggctgcatagtattccatggtgtatatgtgccacattttcttaattcagtctatcattgttggacatttgggttggttccaagtctttgctatcgtgaataatgccacaataaacatacgtgtgcatgtgtctttatagcagcatgatttatagtcctttgggtatatacccagtaatgggatggctgggtcaaatggtgtttctagttctagatccctgaggaattgccacactgactttcacagtggttgaactagtttacattcccaccaacagtgtaaaagtgttcctatttctccacatcctctccagcacctgttgtttcctgactttttaatgattgccattctaactggtgtgagatggtatctcattgtggttttgatttgcatttctctgatggccagtgaaggtgagcattttttcatgtgttttttggatgcataaatgtcttcttttgagaagtgtctgtccatgtcctttgcccactttttgatggggttgtttgtttttttcttgtaaatttgtttgagttcattgtagattctggatattagccctttgtcagatgagtaggttgcgaaaattttctcccgttttgtaggttgcctgttcactctgatggtagtttcttttgctgtgcagaagctctttagtttaattagatcccatttgtcaattttgtcttttgttgccattgcttttggtgttttagacatgaagtccttgcccatgcctatgtcctgaatggtaatgcctaggttttcttctagggtttttatggttttaggtcgaacgtttaagtctttaatctgtcttcaattgatttttgtataaagtgtaaggaagggatccagtttcagctttctacatatgactagccagttttcccagcaccatttattaaatagggaatcccttccccattgcttgtttttctcaggtttgtcaaagatcagatagttgtagatatgtggcgttatttctgagggctctgttctgttccattgatctatatctctgttttggtaccagtaccatgctgttttggttactgtggccttctagtatagtttgaagtcaggtagtgtgatgcctccagctttgttcttttggcttaggattgacttgtcgatgccagctcttttttggttccatatgaactttaaagtagttttttccaattctgtgaagaaagtcattgttagcttgatggggatggcattgaatctgtaaattaccttgggcagtatggccattttcacgatattgagtcttcctacccatgagcatggaatgttcttccatttgtttgtatcctcttttatttccttgagcagtggtttgtagttctccttgaagaggtccttcacatcccttgtaagttggattcctaggtattttattctctttgaagcaattgtgaatgggagttcactcatgatttggctctctgtttgtctcttgttggtgtataagaatgcttgtgatttttgtacattgattttgtatcctgagattttgctgaagttgcttatcagcttaaggagattttgggctgagacaatgggattttctagatatacaatcatgtcatctgcaaacagggataatttgacttcctcttttcctaattgaataccctttatttccttctcctgcctgattgccctggccagaacttccatcactatattgaataggagtggtgagagaggtcatccctgtcttgtgccagttttcaaagggaatgtttccagtttttgcccattcagtatgatattggctgtgggtttgtcatagatagctgttattattttgaaatacgtcccatcaatacctaatttattgagatattttagcatgaagggttgttgaattttgtcaaaggctttttctgcatctattgagataatcatgtggtttttgtctttggttctgtttatatgctggattacatttattgatttgcatatattgaaccagccttgcatcccagggatgaagcccacttgatcatggtggataagctttttgatgtgctgctggattcgttttgccagtattttattgaggatttttgcatcaatgttcatcaaggatattggcctaaaattctcttttttcgttgtgtctctacccatatattgccctctttaaaggctcaaaatctcaaatgcagaaagaatgacttttaaatatcctacatatttaaaccatttattttatacaacaatcccatagatgcaaaactactactaataaacaagtaacctaagccgaattaaataaaagtatacaaagaaaaaattagccgtctgtggtggtggatgcctgtaatcccagctactcatgaggctgaggcaggagatttgcttgaactcgggaggtggaggttgaagtgagccgagctcccgccactgcactccagcttggaccacagagcgagactgtctcaaacaaaaaataaaaaaaaaaaaaagaaaagaaagaaattacttcttttacacttgctcttctgtgtttagtttcaaaattatcatcttcatgcaaagtatttagcacagtgcctggcagatagaaaaggttaactattatttatttatttatttatttatttatttatttatttgagacggagtcttgctgtctccaggctgcagtgcagtggcgcaaccttggctcattgcaacctctgcctcccgagttcaagcgattctcttgtctcagcctcctgagtagctaggattacaggcatgcaccacaacgccaagctaatttttttaaattttattttttaagtagagatggggtttcaccatgttgaccaaaatggtctatgtctcttgaccttctcatctgcccaccttggcctcccaaggtgctgggattacaggcgtgagccactgcacccagctgctagctattatttctaatcctttgccatgctcaggtataatcttcccaaatccagaagtaattttataacttcagctaattgcagtgataaattattgaaatattttcctaaagaaaatacacaaatgaaaccttaaaaatacaaggactgggccggcttggtggctcgcgcctgtaattccagtactttgggaggccgagctggatggatcacctgaggtcaggatttcgagacaagcctagccaacatggcgaaacgtcgtctctactaaaaatacaaaaattagctgtgcatggtggtggacgcctgtaatcccagctactccggaggctgagccaggaaaatcgcttgaacctggaggcggaggttgaagtgaggctagttctcactgctggactgcagcctggggcaacagagcaaaaactgtctaaaaaaaaaaaaagtctgggcgcggtggctcatgcctgtgatcccagcactttgggaggccaaggcgggcagatcacgaggtcaggagatggagaccatcctggctaacacagtgaaaccccgtctctactgaagatgcaaaaaattagcagggcatggtggcggatgcctgtagtcccagctactcaggaagctgaggcaggagaatggtgtgaacccaggaggcagagcttgcagtgagccgagatcgcgccacttcactccagcctgggcgacagagggagactctgtctcaaaaaagaaagaaggaaagaaagaaagaaagaaagaaagaaagaaagaaagaaagaaagaaagaaaagaaagaaagatggatgaaggtatagtaaattatgaaaaagagagaataagcatcttcaacaagaaaaatgaaaataataaaaactatacaattgcaaaacaataactcttgttaaaatattttacatgtcatattgtaaataagacaccctccgtgtatgcagaaatgattacattagtataggaaacagctgtgattgtagatatataaactagagaaatgtgaatcagaaataagtttatcaactagaagagagaagaaatttttatttgagtaaatctactgtctacaatttaaaaatacacaatggtatttctttcattaaatagctttatttaaatataaaaataaaagcttatacataggccagaagaaatattgctagtttataataaggttaataggaactaaaacagggtaattagataagacggtgtgtaaataattatgttattttagtaaaaatattcaacactgtacctttcaaataaaaatatactgttttaaaggtcaacaaaaagttattgtgcttcaaattttaacatttatcctccaagtgaaattactataagaagaaacaactaacctataaataaataatttactttttggaaaagttaacaaacctctctacacacaatataattaagaaagataataagaaacatatataatttcaagattttcaattttttttactaagccagagaagataaatgagttaatcattcatgtcagtaagtaaatacaggatcaaaaaacatacctaatggaaggaaattaataacagaaaagtaaaaattataatctagaaaatgaaagatataaatcgattcataaatggataagacttttaagactttttttgaagaaatcatttcaaactagaataagcaagaggaatagatcaaaacaaaaaggaaaacagtgaaggtgatatacacatcctcttactgaaaattaattttaaagaactttaaattaattttaaagaattaattttaaacactaaaactcagagtcatcaatgtgtctggatacggattcatttttatttcttctgctcagcacttgttttatactttaaattagagtcctcaagtctttcctctgcaatggaaattttatggcatcatgtaaagtatacaaatagtgaaggcattgccagtgttttcttctgtataagtattctctaccattagaatggaaacgtcatcaaagtgggcccttagtgagagtttgctgagtggatgaatactgtccttaaatatggcttctccattctctttggactccttttgaaactcctatcatacatgtgttggggactttcttgactggtctttctgacttttaaatccttttatctggataaattcatcattatctcccaattgactaattctttgtgtttattgcatttacacttcttttttatataattttcatttctagagcttttatttttttttccttttttgagatggagtcgtgctctgtcacccaggctgaagtgcagtggcatgatctcggttcactgcaacctcctactcctgggttgaagtgactctcctcctgcctcagcctcctctcctgcttcaacctcctgagtggctggaattacaggcatgcgccaccacactcggctaatttttgaatttttagtagagacggggtttcattatgttggtcagcctggtctagaactcctgatatcatgatccacccgcctcagcctaccaaagtgctgggattacaggtgtgagcctccatgcctggctgcttttaattttttatatcaatctttactttgttcttttttgcctgctttttttttccccagggtcttactctgttgccccggccagagtgcaatggcgtgatctctgctcattgcaattccccagggttctatcaattctcttacctcagcctctggagtagctgggattgcaggcacccaccaccattcccagctatggtttcgccatgttggccaggctggtcttgaagtcctgacctcaggtgatccacccaccttggccttccaaagtgttaggattacaggcgtaagccactacgcctggccttttgcctgtttttatttatatttttttcttttctttctttctttttttttttagatggagtctagctctgtcgcccaggctggcgtgcagtggcatgatctcagctcactgccagctctgcctcccaggttcacgctattctccttccccagcctcccgagtagctgggactacaggtgcccgccaccatgctgggctaatttttttgtatttttagtagagagagggtttcactgtgttagccaggatggtcttcatctcctgacctcgtgatccacccaacttgtcctcccaaagtgctggaattacaagagtgagccatcacactcggcgtctgtttttatttttaagtcttctattctttttgatgaattttattctttttttttttttttggcagaggctcactctgttgcccaggttggaatacagtgatgccatcttggctcactacaaagtccgcctcctggggtcaagcaattcttctgcctcagcttcttgagtagctgggattacacgcacccaccaccgtgccctgctaatttttgaatttttagtcgagatggggtttcacggtgtttgccaggctggtcttgaactcccgacctcagatgatttacccatctcagcctcccaaggtgctgggattacaagcgtgagccaccatgcctggccctggatgttttcttcttaaaaagccagttgagatttctaagtgtactcacttaaaaggaaaatttagtttgctataatatttctcatatttgctgtggtgaattcatctctaggaggtttctttgtataattatttcattatctgtctaatagttaattctccacatgttttgtaatatttttgcacactcaccttgaatgaaaagttctctacatgtcatagtcatataacaaacagaattcaccctccttcaccacaaatcacacttctgtatattcaataaaatgtgcatttcttcatggatactctttgaatcatctaaatggagactctttatagaaatattgaatcattaattcttccaactattgtactcctttccaacatactgtcttactgatttttcactttttcctatttatatccattttgttctactaatccgtctgtcattggccttcttctatagccaacctcaaatttcaattcacactagctgtgaacagcactcaaattgctgctgtattctaaaaatataaatttacttcataaagcaaaagtgaattatatgcatgttacaaaaaatattcctagcagagataagatggggtggtatttgctgggatgtgcaacatcgttttttccaaattaatttctctcagaattctctcctccctactgccaggcagagctcaccactcacatgtcatgaatgacatttttagtcatttttcatcttatctgatcatatgacttgaattaatgtttagatctgctaagggcaaacaccaccatggaattaaatttgcaagagggaagaaggaggaagcaggagaaggtggatagagtcttcagactagggtgcagatcttacatctgtagagggaaagagggaaggaaggctgattggggtagaaagagactgcagcatggttccaagaatgctttggcctaggtcactgcggactccttaaattaaagttactcattggagactgtcacaactcactggaaacgtcctcacatacaatccccatgtagctctatgactgttggaaacatgactgctgcacaagtgtagaagtgcttccagagacagagggctaaagccaggctgtcgttgacttatgctgtctgattcaggatatctgcattgcaaacttccttggtcattaaaatccattacccccacctcctaaccccaccacagcacacacatatttgtccaaacaggttcttcataccagctcttccaaaattcccatgatcctctcttttccaaggggaatcttagaaaaggaaggttaatgagaccaactctagcccatgctatagcagttggtctcagaactgcctttgaatgcccagttgtgtgagggggagagaaagagagagagagtatgggagtggggagtgtgtgtgtgtgtgagtgtgtgtgtgtgtgtgtctgagagagagaaagagagaaattatctctgcttcttttgtagaaaagtagccctacctcctcctgctaatcagggtgtattcatcctgccccagtggtgacgtatttcttgtcttttggttactggacctaaggaatctaaagcacccaacagataacattctttagagagcaggacttgcttgccttccagatcccagagctgcagtgatgagaagcacaggaaaacctgagaagattattgggagcatttgtaattagggacattcctgtttctacctctggttttctgaacctgtagattcttcctatggaagaagaactactatataaagatctgtgatagaatatatataaaagatggtgccccctgcattcagaatgtctcctttagcatagtgtctcagttgcatctttagaatgtttctccagggctccatgagtctagctgcttcttgaagagtgtatgtaatacaaatagtagattacatggtcatggacccacttctgcccatcctttgctgtgaacaaggaaccctggtcagatgctataccatgtgggattttatgcctgtggatcaggaattctggaagcctcagaaaagtggtcctggctcaggctctgtgaacagaagtgccaaacccagccctggaataaggatatatccctctgaggatgaaaaggtggtcattcaaggtcaaaagacttgccatataagagtctcattattgatttatgctgttgaaaagtaggacagtcagaggcagcagtagttagataaaccttgatacatagaagtccaggctgtggggcccatatgtatcgtccatctctgccaacatggtcatatgagtgactgcatatgtatgactgttgtgcttgttgtgggaaagccaatctccaaggctggcagcttgtcaagtcattttgtctgattggttattgagtgcctcttctgtggtgagtgctttcttgtgagtgttaacgtgcaatacaagattctttacactccgtgcctgctcctgcatgtccactcatatgcttctaacccagcttccttgtctcagatatttcagttcttttctatctaagcctctgatcagatgattcacccactgactacggcaaagaaatctgtttatattcctgccttaggccatgtttcttctatgtaaagtagatggccagggccactgctcccagtgctgctaatagggaatattttaatttccttctgtccttcagagtcattcttgcattgggctgcaatgcaactacacctttaaacagagattgcccctttctccctccttcagatggccacagggacacaaatgcagtcacaggtgtgagctgaaggaaggttgctggtgcaaacatggtgggtgacatgaggatctgggttacctgctattcaacttatccacttgctctcatcttgcttggcctttgtctcatatttactctttccacctcatgatgaactacttcttttcccttctggtgtcatgacttggtggttccaatagaactcagcctgcaagaggtagtgccagaagcatggtaacttatcaagcacagcatctctcctaggtccaacatataattctctgctatggaaggcatggctttgtttcagaatcccaggaactggtgttgtaattctttcactgagaattgccatgtgtgccacactgtgaccaccattgacacctgcaagaatacaggtcctgcaagatcatatgacccaagctgcagggctgttcacaatggaacctggacatgctgtggagccctgtcctgccctgcactcttcaaaccctgtggtcttcctatctccctgacttgtcttgtggcttacttgtgttatgttgcttagggtttcttgagtttcatgagtttgtatttttataactgtatagatatagatggatatatatagatatggtcaaagaggaagagtaagagagaagaaaaagaattttacaaaagactttactggacatgtagaaaaaaatatcaaactccacctctatttccagcactttggaaggccacggtgggtgaatcagaaggtcaggagatcgagacaatcctggctaacacggtgaaaccccgtctctactaaaaatatacaaaaaaaattagccaggcgtggtggtgggagcctgtagtcccagctactcaggaggctgaggcaggagaatggcgtgaacccaggagtcagagcttgcagtgagccgagatcttgccactgcactccagcctgggtgatagagcgagaatctatctccaaaaaaaaaaaaaaaaaatcaaactccatagtgagaagtcaaacaacacaataacaaaatgggcaagagatttgagtagacgacaataaccaaagatatattaatgattgataaacactgaaaagtgcatcattaaccacctgggaatggaatttaaaaatcaaaatgcaataatactgcacagaaactataatggatccaaaaaaatgtcaattctgaatgtttgagaggacatgcaacaccctgaattatcatatttaggtgggagtataaagtggataatcagtttggattgcagtttggcagttaaacatacacttacaatttgacctagaatattccattcttacttactgaagagaaatgaaaacatgtgcatacaaatgaacatagcagctttacttgtaataatcaaggaatagaaacatttgtaaatggttcaccaacaggctaaaggataaacatattgtagtatttccatacaatagaaaaaaatagaaagaaccactgattttgcaacataggtgatcctaaaatatattgagagaatgaaccaacagtaggcatattataaaagtttattactacaaaattctagaaactgaatttatagtggtaggttgcagatcaatggctgcttggagccagaggttttggtaaggaatacaaaagaacttttgaggtgatagacagcttcaatatcttcatcggtggtagccacataactttatatgtttgtacttaatttggatgcattttattgtattgaaagtaaacctcagttaagttgacttttataatttattagattctaaaacattaatttgcttccatccattatatttgttcacaaatcctacaatagtatgttttggaagacctgtaatagacacagtaactggcatattcataaaggaaatttccttatgtaggatagtttttaggggaaatgcctgaaacaaaaaaatctgcatctgcttatcataattcgctgcataaaagatctaaatgtgtaactggcaatcagctttagctttgattatctttcatagcagcatggatcaattttgtttacccagttggctatttctccatgctaaactcatattgcatacatgcctctgaaattccagtcatgtatagtctataatgtatacctatattacacaatttgtatacttttccactttaaaggggggatttatacctgcaaagggacttgacctacaactatcatccaattctgttccaaattttggatactatgactctatcctggaaatgattcagtagttttgtttcatttgactcttcctacagacataatgtgttgaagtaaacctgttttttatgtttggaaagtagcctttggatgggtgttttctagcttttggaaaacatgtacttgaagcagaagtaactagttgttgagggaatagaaccacagcatttctgacctaggcaaattgaaaccttgtcatccttgatgacaaacatgacatgacacatgattgcctttttcagggagttcttatgtaaaatattttatccccaactagttggtatcattcaaatcaaattttataattttactctgtattaggatgcagttttataatgtccaaagcatctttacgcatattttttctcaaataaatcctacagcaactgtgtgacatgctcaaaggtgagaatattatccccattttacaactgagcaagcagacttcaagatttgttaactttttagagctgaagtttagtccactattttatgttatcaacctttgatttgctctgctatacccaccaatttagaaaagaatttacccaagattgtaacatgtaatacaattaatttatttttttttctctccacttgaaaacagaaacagtggtgattatggagtatctactgattattttgctgggacaagttgatgtcactaaatttataaattgaactgaactgataacctcagttactttgccaaaattccttcttttaatattacataaactgtagaatgcagaagaggtacttttaatttctaattatttaagtagagaaagactcaacacttccttttaggctcacacataaaatttctggttgatacatcaccagcgattgtgtttcagcatgtatgtaaatgcagctttctgaataggcaaacttacaggaattatggaatatcattgtatttacatacagcagtatctcagacatcactccaaaaactaaagggcaatgaggaaatatttccaaaagccatattacagtgctttgggggaggtgaaagagagaatgctgcaatatgttttcttgtttgactgactcaagctacattctaggagatattttaaaaagtgaataaaatctctgtgtcatagtcaaaagatgtaaggcaaaccacaattatccaaggaaatctgaaatgaatattactaaatacaaccttctggatttggttttacttaccatgttgactatgtctgcttatggttttcttacttatgcctacctacaccatcttttaattaaatgtgccgataaaatttctaagtgcagaatttcctttgcttgacacaaacactttgttctactgtgaatcaactgctggggctttctattgtatggatttctacaaaaggatgtgctgtaactcaagtataagcagatggttctttcattgttgtaaatcaaattggtataacctgtgactgggttcgatgtggccccagtttcctgaggcctgtgaaaattgctaggtagctcattttcattttttcttatcaccttaactggagttggaggcccttgcaagtccaggacaatgacgtcttaggcaacctcagttgtctagtgtgacttaataagcctgatgtatgtagtagaaccaatcttttcttttatatataatgccattttaagtgatgtgaaccttattctctaggttacaggtattggattactttagttctttattataataagcaaggtgttaattttttgttgttgttgttgtttgagacagaggctcgctctgtcgcccaggctggagtgcagtggcgtgatcttggctcactacaagctccaccacccgggttcacgccattctcctgcctcaacctcctgagtagctgggattacaggcacctgccaccatgcccggctaattttttgtattttcagtggagacagggtttcaccctgttacccaggatgatctagatctcctgatctcatgatccgcccgcctcagcctcccaaagtgctgggattataggcgtgagccaccgcgccctacccgctaatttgattttttaactcctaaattctaccactttccttactcgctttctaatgaaaattgatggagaaaataaactgaaaatatcacaattctaaacattccactattttgagattctaaaattattggcttttgatgttcactgattcatgtcggatttttagtagcataatcaaacctttttttggcaatggtatagagtgcaaaatgcaaagccatttgccatggtgtagatgctcacagtatgcccctgcatctaaagagatactattctccaacataaatcagacatatagaaaatacttacagcacagaaaatatgaactatggcatagaaatacattaaattagctaaatgacatccctaataaaaatctgaatctggccgggcacggtggctcacgcctgtaatctcagcactttgggaggccgaggcaggcagttcacctgaggttagttcgagaccagccaggccaacatggtctgcaaaaaaaatacagaaattagctgggcatggtggcaggcacctgtaatcccagctacttgggaggctgaggcaggagagtcacttgaaccagggaggcggaggttgcaatgagctgagattgtgccattgcactccagcctgtgtgacaagagcaaaactccatctcaaaaaaaaaaaaaaaaagaatctactctaaaactgggaattttatgtttaagtagattcacttaattttttcctataatctcctgagacaagtaaatgttttcaacagttgcgcttaacaaactgaagaactggaaggagaaacaacattattaataattacttccagagtggggtgtggctcacatctgtaatcccagcactttgggaggccgaggtgggctcatcacgaggttaagagatcgagaccatcctggctaacacggtgaaaacctgcctctactaaaaatacaaaaaattagccgggaatggtggcgggcgcctgtggtcccagctacttgggagcctgaggcaagagaatcgcttgaggaaggctggccaacatggctaaaccccatctctactaaaactacaaaaattagctgggcttgttggcgcatgtctgtaatcctagctactccccgaggctgagacaagagaatcgcttgatcccgggaggcggaagttacagcaagccgagatcacgccactccactccagcctgctctacagaacaaaactctgtctctcaaaaaacaaaaaaaaaaaacaaaaacttcctacgatgcatgattaaattacaaagttttctattcttttcttttaaaaataaatatcttagctgcctgttttcattctggccatcaaaattgcctaaattctttgtgggcaatatcatcaacccttgagggaaattcaagatattcctaacacagaaatattcttagctgaaaagagtatgggatgacaattttcaacctggcatatataaaaagaagaaaaatgttgggtaaatgaacagcaaaagaaagatgacattcatatgtcctatgcaattctgaatacttattttatgtaggtgaatattttaatgaaagacatttattgattcaaaatattttttaacttaacgaactttggcaaaacaatgcccttcagtcagtgactatattatcaagtttcacctacctctgatcaaggaaacaaaaataatagtaattccatactcagtatgtgtgagaaaataagatgtgtttagttctaattattttgagttatgccacataacacataacagtatacatttattttgagttcatatgtagaattagactacttttttaattttgggaacatggagaacaatattataggattatattagtaaggctgtggtaaatactaacattaagctctccttatgtgacacacacagttccttcaccaaaatgggcaaaattttagctgaagacttataatgaagcctagacattcatgaagaaattaaacaacttgaccattattagaagatagtaaatacacgcatgttcaataccagcctctttttttctcactttatgttttttgaatgccattagatttacatatcctgctaacataacataaaaacaaaccttaagtttcaagaaattaacaattctagttacatactatttacatgtttttcttattaactattagttatttcaaaacttaccttttatgttttgagataaaaaatatctaatagaaaggtagttttttgagaagaatgccttttttattatttttatttttatttctttattttttttttgagacaacatcttgctctgtcacccaggctggagtgcattggcgtgatgttgactcactgcaaactctgcctcccaggttcaggtgattctcctgcttcatcctcctgagcaggtgggattagagtagcatgccaccacacctggctaatttttgtatttttagtaaacatggagttttaccatgttggctaggctggtcttgaactcctgacctcaagtgatccatcctcctcagcctcctaaagtactgggattacaggcatgagctacctctttttaaattatttttaaaggatactttagttttcctagtaatccatgtgaatgtattctctatgaactatagtgtgtgtgtttactttttatatatagaatactactgaggagcaagctgtttctgtaaatgaaatgggactgaacctctaccgtggttgtgttctacatgttacagagacctggacagagacagtatgattatctcatgaacatcacataatctcctgtcacagtcccaagataaaacatttccttaaaatcaagacttgctttaataagcaccacatttattacaataataccttcccactataatcaatatggatataaacagcctttgttctatttttctcatacttggaagacttttgctttcattccatgaaaatcttgtatttctcctcaattattctaattagaaaaatagtgctgggggagaaaaaataaaacagcacagaaaggaaaggggctcctgcaatgcactgtttagacagataaggtagcctggccaggagatggtcaggtagggactgccttcttctctctggtggtgagaattgagaattgctgagaggtgtgcaagtggagctgattgagcctgagcacagtccagctttcttccatgttctctacataaaataatcaataatcttcagcattaagacctcatgatctcatgttttgagaaggagagttgagaaacacctactagtcttgtgataggttgagtactttaaagagttttgggccaggtgcggtgactcacgcctgtaatcccagcactttgggaggctgaggcacgtggatcacgaggtcaggagatcgagtccatcctggccaacacggtgaaaccccatctctactaaaaatacaaaaagttagccgagcatggtggcacacacctgtaatctcagctactcaggaggctgaggcaagaaaatcccttgatctggggaggtggaaattgcatgagctgagattgcaccactgcactccagcctgggtgacagagttagactccatctcaaaaaaaaaaaaaaagaattttgaagcttcttaattccatttatttaagacattattctcattgggattacgggggaatccctgaattttggtaaaaacaaatccaagtcacaaaatcagaaaaaaaaagggaagatataggatgatgcgtttcattcttcatatgaatatgcattttacaaatatataactaagaccaattttggatttatttccaggcttggagataacttatggaaacttttaacattaaagttaaatttgcaattcagaattaatccatacattatttcactgttttcttgttaatattaaatgctgctgactcagtaaagtttattatttgaatataacaagaatgtgtgaattgtaaatgccatgctaaagtctggaacatttctacaaaattcagtttagcaaatatttgttaagacttcagtcaaagccttttacaactgcactgctctaggttttgaggactcaaaataatctctgctcacaaaccagacatgcagacaaataaggttctatgtattaaggtcaataatagaattttgctgaagacaaaatattatcgcagacacaaaaaaattagccagacatggtggcaggtgcctgtaatccaagctactcaggaggctaaggaaggagaatagcttgaacccaggaggcagaggttgcagtgagccaagatcacatcactgcactcatcttgggcaacagagtgagacttcatctcaaaaaaaaaaaaaatcttgattcctttatcccctgtgcttcacagcattcagagtcttccatattttctgggagtttcttggttagttgggcttggcctctcctcacttactgttggagcctgccctcttctctgtgctccagagcagatcatgttttctctactcagttccctctagtgaggagactcattccactttcacccccaccttagcaccaagcaccattaattcaagaccactatgtggaggagataagggagaattacatcccacgaagagcagcaaaatgcataaacatgcatatatatacacacatatgcatgtatatgcacatatacacacatatacatatatatgcatatatacatacacacatatatacacgtatacacatatacacacacacacatatatacatgcatatattgccaccactatcctgaatctcctcattttttcccatcagaaggaatttctccaccccaccctaccattttcttggaacttctagtctctctcacattattaattctacacctggggctgccttgccccctcttgctaactgcctggtggtaacttggcactccacttagttactacttaacgttacagctcacccttttttacatcatatttatgaagcattaaatattctaaaagtggccgggtgcagtgattcatgcctgtaatctcagcactttgggaggccaaagcgggcggatcatgaggtcaggagttcaaaacctcctgaccaacatggtgaaaccctgtttctactacaaatacaaaaattagctgggcatgatggcgtgtgtctgtaatcccagctactcaagaggctgaggcaagataatcacttgaacctgggaggcagaggtcacaaagagccgagatttgtgccactgcactccagcctgggtgacagaacaagactctcaaaaaaaaaagaaaaaaaaaaaacaagctactttgtctagggtaccctattataccaaggaatttagtgcctcatgaaaaaagactctcaaggatgtttttctaaacaatagaaccttctaccttagaaatcatttatggtattatccaacatcattattttttattttatatatatttttcactacaataaaaatctttcaaatatatcaaaatacaattttattaaaacagaaaagttgtttattagataatcttttaattttaacatattaatttatctatcggggttctatgtcattcactcaggaagagaattcaatgaataaatgtggtaacttcacatatcgtagaactttttcacaaaaatgggcaatttttcatttttcagagtgaacactgagccaccacctgaggaaaaataaatgatcatttttaacaattaaagttacttttttttaatcatctggtcttttaagatgtttttagacttatagatcaagataagaagttagcatgcacttatccttctttcaatttgtatccatccctaatttatttcttcctattgtgcaatagctcattattaagctgagcttccattttactcattcatgtttatttatgggtcaggcaactgaactgcatacaaattcacaaattttctatttttttttttttgagatggaatcttgctctgtcgcccaggctggagtcagtggtgcagtcttggctcactgcaagctctgtctccagggttcatgccattctcctgcctcagcctcccgattagctgggactacaggcacccaccaccacacctggctaattttttgtgtttttagtagagatggggtttcaccatgttagacaggatggtatggatctcctgaccttgtgatctgcccacctcagcctccaaaagtcctgggatacaggcttgagcaaccgtgcccagcctacaaattttctttgtaacttaccttattattaaattggtcttcctaattcttatttttttatttttttgttttttattttttatttatttttttgagacggagtcttgctctgttgcccaggctagagtgcagtggtgcaatctcagctcacagcaacctcctccacctcccgggttaaagccactctcctacctcagcctccagagtagctgggattataggcatgcaccaccacgcccggctaattttgtatttttggtagagacagggtttcttcatgtaggtcaggctggtctcaaactcccaacctcaggtggtctgcctgccttggcctcccaaagtgttggaattacaggtgtgagccactgcacccagcctggtcttttaaaatttgacctaaacagttcatcctgtcatgttcttcatgagagatgaaggtccactatttttcccttgttattttaataaaaacaactatttaccttgaatatactgaatatatacaaaatacatattcatttacacaccatggctttttaaaagggttgtccttagatgtggcctccagggatagttaagctgtaaatggaaggcttcatatgtaaagacattttccttttgaccttgtttcttatggtgagtgtgtgtgtgtgtctgcttttagtggtagaagttaaggggaatctctatgattgtttttttttctctccatttatccctcattttctttctttttttttttttttgaaacagagtcttcctttgtcagtgcagtggcatgatctagactcactacgacctcttcctcctgggttcaagtgattcttatgctcagcctctcaggtagctgggattacaggcatccaccaccatgcccagctaatttttgtattttaatggagatgtggtttcgccatgttgcccaggctggtctcaaactcctgagctcaggcaatctgcccacgtcggcctcccaaagtgctgagattacaggcatcagccaccatgcccggccccatttatccctcattttaatattttttaatattttttttctttttttgagatggagtcttgctctgtcacccaggctggagggcagtggcgggattttggctcactgcaactttggcctctcaggttcaagcaattctcctgcctcagcctcccaagtagctgggactacaggtgcccaccaccacgcccggctaattttttgtatgtttagtagagatggagtttcaccacattagccaggatggtctcagtctcctgacctcatgatccacctgcgtcagcctcccaaagtgctgggattacaggcatgagccacctcgcctggactatccctcactttataacattaatcaagttcttttataattttatgttaaagatttttgaattttgttaatctattttattttccttcataaaatgatcaaagctagaaataacattacaaagtatatcataatcgttaacagaaagagctctataatcagcttaaatttcttttctctcttttctagttatgtgatcttaggcaagttacataaattacctgtgttcagtttatttatttgtgaaatggggaaaataatggtgcctgtctctgggtaagattgtagtgagggtgaataacagatttatcaagcataaagcagtgcctgggacacaggaattgccctctctgcatgcccctgcatatgtgtgcatacaggcatgaatcacttgatgatggaataaatttggagaaatatgtctttaggcagttttgttattgtgcaaatatctcagagtgtacttacacaaacatagatgggatagcctactactctgctagagtatatgatagagtatatgtagcctgttgctgctaggctacaaatctgtacagcatgttactgtactaaatactgcaggcaactgtaacacagtggtaggtattttgcatcttatcatagaaaaggtgcagtaaaaaaaaaaaaggggtacacttgtagagggcacttaccatgaatggagcttgcacagctggaagttgctctgggtaagtgagtgagaggtgagtgaatatgaaggcctaggacattacgggcactgttgtagactttagcagtactggatgtacacttaagctatgccaaatttatttttaaattgttttcttttatcaataataaattagctttagcttactgtaatttttttatttaatatactttttttaaccttttggctcctctgtcacaactcttagcttaaaagataaacatattgtacaactttaaaaaatattattttctttatatctaagtctataagctttttccaatttttaatttttgtgttactttttaactcttttataaaaacaaacacaaacacgcacattagtttaggcctatacagggtcaggatcatcaacatcattgtcttccaccttcatattctgtctcaatggaagttccttggggcaataacacacatgaagctgacatctcctatgataacaatccctccttctggatacctcctgaaggacctgcctgaaattgctctactgttcagttttctttttcttttttaataagtagtaccctctcaaaacatgacaaaaagggccaggcatggtggctcatacctgtaatgcaagcaatttgggaggctgaggcgggaggatcacttgagggcagcagttcaagagcagcctggccaacatggtgaaaccctgtttctactaaaaatacaaaaattaggcaggtgcagtggtgggcacctgtagtcccagtttcttgggaggctgaggcagaaaaatcacttgaaaccgggaggtggaggttgcagtgagccgatatcacaccattgcgactccagcctgggcaacagagggagactccatctcaaaaaaaaaaaaagataaaaagaatagagtaagccgggcgcggtggctcacgcctgtaatcccagcactttgggaggccgagacgggcagatcacgaggtcaggagatcgagaccatcctggctaacacggtgaaaccccgtctctactaaaaatacaaaaattagccgggcatggtggcgcgcgcctgtagtcccagctacacgggaggctgaggcaggagaatggcgtgaacccgggaggcggagcttgcagtgagtcgagatcgtgccactgcactccagtctgggtgacagagcgaaactccgtctcaaaaaaaaaaaaaaaaaagaatagagtagtaaatatataaaccagtaatattgtcacttattatcattatcaggtattatgttctgtaagtaattatatgtgctagaagcctggcagcacaataggtctgttttcaccagcatcagcacagacatgtgagtaatgaattgtgcaatgatattacattgacaatgacatcactaggaaacaggaatttttcagctccattacaatcctacaggaccaatatgtggtccaccatttactgaaatgtatttacatggtgcatgactgtaaaattactagtcttcaaaaatcagttgtatcttcaacatttcctacctctgcaaaatgcatcaccattctcccagttacccaggcttaaaacctcagaattctatcaaattatttcatttccttacatctcatgtttaattagtcactgattcccatcaattttcccctatcatgtttaatagtaccaacacattatttctcttagaaaaacatttttctagtttaagatcttaatttagcctattttaaaaaaatctcaaagttttccatacagtctttatttcttatttcttaaaatattttctacatttttatacaactaacctttctaaagcataaatatctcactttgtcacttgtatgcccccccaaaaaacaaaaaaaaatatcttcttggtctagaaagtaaaattataatgcttggcataatgtagacagaaattcccatttatcctttttctcctttgcccccacacttttcttccatgttcacatcagtacctaatctcccagacatatggaattcattgtttcatgaataaagccaacacattctaactaccatgcatttagtcaaaccatctgtccacctggaatttcctaccatcccccataaaatttaaattaaaaaattccactgttctgtcctctctgaagatgtccctgaacctttactgaaactcattgacatatcctttggttcccgcagcctttattgtatatgtcataatttagcacatacattactctgccatacattttagtaagttaatgacctgtctcttttcactgataaaacagtgtcaggattttttcatttttgtattccctactggtccacagagtgctatgaacatataatttgctaagttaattttaaattgacttaaacttactggtgaattcaccgattaactgttcttttccagtattactcttagaaatgtcctttccttgatatattttatgttctaaaaaattaatttcattttaagaatcacatcctccaaaacaaaagaaacaaaagctcccatacaattctaatgatagttataggtaacattaaaaaatggcataccaactgtaaaaaccaaaaacaaaaaaacaaacaaaaacaaacaaacaaacaaaacaattcccatgaaagccagaggcaaacaatgcaaattttaatgtcaatattgtcattttttcctaggttaggggacaatataaccacatttataaacttattctttttgtctatcctcatgttgacctcacacatagcatattatgccattaaaacaacaaaaaaaggagaaaatgctatattgaaatccagtattttcttacaacaattccttactgtgaattgtgaatgaaaattaaattctttaatcactaggaaagactctgagtgtgagagtgtttctttcagctgatataaacattgataagatcaaagcttgctctaaattttctgtcttaccaggtcttgactgaatctcagaacaaaatcctgtagtttctctttatttcagataaacctttgatcttttaaaaatataggcacatctgggcacagtggctcagtcctgtaatctcagcagtttgggaggctgaggtgggcagataacgaggtctagatatcaagaccattctggccaacatggtgaaactctgtctctactaaaaatacaaaaattagctgggcgtggtggtgcacacttgtagtcccagctactcaggaggctgaggcaggagaatcgcttgaacctgggaggctgaggttgcagtgagatgagaacgtgccattgcactccagcgtgggtgaccaagcgaaattccatctcaaaaataaaaagataaatagtcacatctggctaaggaaatggcaaaaaggcaaaaagatatgcacaaaaaaagttagccactacttgcattgaaaatgggttcaagtttaaggttttggcaagtgtttgagaaaaatatgaattaagctcattttctgtggagacaagtctctaggcgtttagttttggttaagttaaatacttaaatctatttaaaattttaaagaccttagtaatgtaaacaaatggtgttgagtttggacttctctacaatatctatgtggaatcttaggaaaggaagaatgaaaggatacaatacattttaaatggtagttcagcctaaatcctaagcataagcataatacactgctgcatttttttttgacagagcctaactctgtcccccagactgaagtgcagtggtgccatcttgactcactgcaaccccagtctcctagattcaagctattctcctgcctcagcctcccaagtatctgggatcacaggcagacaccagtcacacccagcttgttttttgttttttatgttttttctttttttggagacacagtcttgctctgtcacccaggctggaatacaatggcacaacctcggctcactgcaacctccacttcccaggttcaagcgattctcctgcctcagcttcctgagtagttgggattacaggcatgtgctgccatgcccggctatctgcctcccaggttcaagcgattcttctgcctcagcctcttgagtagctgggattacaggcatgtgccaccatgcctggctaatttttgtatttttagtagagacagggtttcaccatgttggtcaggccggtctcaaactcctgacctcctgatccaccagcctcagcctcccaaagtgctagaataataggcgtgagccaccatgcccagcccattttttgtatttttaatagaggtgaggtttcaccatgttgaccaggctgatctcgaactcctgacctcaagtgatctgcccccctccacctgccaaaatgctgggattacagacaagagccactatgcctagccaatatgttactttaaaaaaataagttattcattttagttttcttctgttgctaacgatcatttctattttgtagggaaaaggaagagggatcagactgttactgtgtctatgtagaaagggaagagataataaattccatttttacctgtaccttgaacaattgctttgtcctgagattctgttaatctgtaactttgccccaatcactgtgccccaacctctttgccccaaccttgagctcacaaaaacatgtgttgtatggaatcaaggtttaagggatctagggctgtgccttgttaacaaaatgtttacaagtagtatgcttggtaaaagtcatcgccattctctagtctcgataaaccaagggcacgctgcactgcggaaaatggcagggacctctgccctggaaagccgggtattgtccaaggtttctccccatgtaatagtctgaaatatgcctcatgggatgagaaagacctgatcatcccccagcccaacacccataaatggtctgtgctgaggtggattagtaaaaggggaaagcccttgcagttgagatagaggaaggccactgtctcctgcctgctcctgggaatggactgtctcggtataaaacccgattttacatttgttcaattctgagataggagaaaaaccaccctatggtgggaggcaagacatgttggcagcaatgctgctttattgttctttactccactgagatgtttgggcagagagaaacataaatctggcctacgtgcacattcaggcatagtacctccccttgaacttaattatgacacagattcttctgctcacatgtttttttgctgaccttctccctattatcaccctgctctcctaccacattcctcttgctgagataatgaaaataataatcaagaaaaactgagggaactcagaggccggtgctggtgcaggtgcttggtatgctgagcgctggtcccctggactcacttttctttctctatactttgactctgtgtcttatttcttttctcagtctctcatcccacctgactagaagtacccacaggtgtggaggggctggccaccccttcatattttcacttaatttactctgaatctatgccacttttgcatttgaggctaatgtttgtattgaaggaaaggatagcaagtcaatttacaattggattttttcaatgtatagagttacatgtttactaaaaggagtagcccttaattctttttaaaaagcccatagtaagcaagatgattaacaatttttatatgaacaaatgtcttacaatattttaaacatctagagaacactgataccgtcttcacttactgacaatggcatattatcaattcacttttccaaagagaaagaagttacttcttttgacttagatctgacttcttaaactgtcaaatgaagtagctgagtataactcaccacctacaactttgatatttagcctcctctcttcatttgctttgtattatatgtactgtagcccttactttaatatttctatatcttacacatctttctctcttaaaaatgtgctttcatttagatgagaaatacaattttaagggagaagttgactcatgcctagttctgtatttttttttaattgctgatctgtcctgaggaaattaatgtcgccctactgggtatgatgctgtccctctggagagattcctgcaagttatgaccactggggattttataggtgtccacattaagcctttcactgagagaagagattaacttgcagttgcctctctgacaaatatatctaagaaatcaacataatctttcaaaaccctctggctaatactagtttgtagccactattaatatagtggttctaagtttgttccagggtctcaaagccttaaatcatttcatgattatactcagttataactcagtagctgagttatactcagctacttcatttaacagtttaagaagtcagatctaagtcaaaagaagtaacttctatctctttggaaaagtgaattgataatatgccattgtcaataagtgaagatggtatcagtgttctctagatgtttaaatgtctagatgcaaatgtcaacatataatgcttacaaggacataactgggtgtttcacactattattttagttttaacccacttgatccatcaagttatctgtcatagagcaaatgaaaggcccctttagagaagtctcagaataaaaaataggcctagttatgttcgttgggagagaagtaattaaagcatgggtttacattttctgtctataagaaattgtcattgtagctgttgtttgtttcaaaatctatgtacagttctgacccaccaactgacaatggctgcctgactctaacactctggtgtgttattgtaaattccctgagtcttctttatagcaagagaaaaaatcaggacattctgaaagtaatacactgtggatatttacatggccagagtataattttctctgcttaataataaaacttaataatgagcttaataataaaactcacatacaaatacaaaataaacctgtgtcaaaatttatttcacttattcctgaggaaatcagtaggtgggaaagctggttccagaacaagtaaaaaaaaaaaattacagattttctttccccaaaaacaagaaatgttagaataagacaactatgttagaagcaaaactgggctgggagcgctggctcacacctgtaatcccagcactttgggaggccaaggcgggcggatcaggaggtcagaaaattgagaccatcctgactaacatggtgaaatccggtctctactataaatacaaaaccaaaattagccggccatggtggcctgtagtcccagctactcaggttgctgaggtaggagaatggcgtgaacccaggaggtggagcttgcagtgatcccagattgtgccactgcactccagcctgggcgacagagggaaactccgccctgaaaaaaaaaaaaagaagcaaaattgattaataacaacaaatagtactgggtaaactggatatccacaggcaaaatataaagtttgggcccttaacttacataatgtacaaaaataagctaaaatagatcaaagacttaaaagtaacaactacaacccttaaactcttagaaaaaaaaacataggagaaaatattctttatgttagatttaacaatgatttcttagatatgatatcaaaggtacagggaataaaaaaataacaaaaaaattagtttcatcaaaagtaaaagttctgtgcattaaaagtcaccattgaccaggtgtggtgggtcatgcctgtaatcccagcactgaggcaggtggatcacaaggtcaggaatttgagaccagcctggccaatatggtgaatccccatttccactaaaaatacaaaaattagctgggcatggtggtgtgcacctgtaatctcagctacttgggtggctgaggcaaaagaatcacttgaacctgggaggcggaggttgcagtgagctgagattgtgccactgcactccagcctgggcgacagagggaggctccatctcaaaaaaaaaaagtcaccctcaagacagtggaacaacaactcaaagaatgggagaagatgtctgcaaatcacatatgtgatatgacatcagtatatgtggatataatatgtataatagaataaagaactccagcaactcaacaataataaatggttcaatttgttaaataggcaaaggacttgaatagataattatctaaagaagatatacgaatggccaacaagcacatgaaaagaggctcaatatcactagcattagaaaaacacaaatgaaagtaatgatgagatatcatttcacacccattaggatgattacaaaacagaaactccagaaaataacaagggttagtgaggattcagagtcaatgggaacccttgtgcattcctggtgggaatgtaaaatggtgtagcttctgtggacaacagttaggtggctcctcaaaggttaaacatagaactactatgtgatccagcaattctatgcctatatacatgcccaaagtaattgcaaatagagactccaacagatattaaccaccaatgttcacagtaccatgatttacagtaacaaaaagcaggaagcaactcaaaggttcatcaataaatgaatgaataaacaaaatacaccatattcacataatggaaacttattcagccttattaaggaatgaaattctaatatacactacagaacttcaatgactacaacctacgtaaactttgaaaacattatgcttagtgaaataagccagatgcaaaaggataaatattgcttgaagtacttagaataagcaaattacagagacagaataatcattaccagggactagtgtgggtgagaagttattgtttaatgggtacagagcttctatatgggatgattaaagagttctggaaatggacggtggtaaaggttgtgcaatttggtgaatgtaatgtcctctgaactgttcatttaaaattcattaaagtgataaattttacagtatgtgtattttaccacaagttaaagaagaaaattaaaagacaaaaatatgtattcccaattgcactgtattttttgttattaagcataaaatttaaactttattaaacttattagaaaaagggaattggaaatgtgatataatgaagtaattcacaaaaatgtgtacagtaaatgcactcaagagcagtttttctgacgtttgatgaactcctatcagttgtgaattaaaactgattaatatccttcatggaaacagatccataaggtctggcattgtctttttctactagagagaaacctagaaattatcacataatcgcatagcatctaggatcaaatcaactaatacatggccaagtcaaaagaaaatgaagtaatctttgggttaaccttttagaggatagcttttaataatgtaatattacactaaaaatacatgttttatgtcagagttttagatacttttccttagcagtccgctatcacaaatatgtcctctgttagtgctaatccataactaactcagttccttattttcatgtcaataatctccaagtgttattctttttttttttttttttttttgagacagagtctggctctgtctcccaggctggagtacagtggtatgatctcggctcactgcaggctctgcctccgggttcatgccattctcctgcctcagcctcccgagtagctgggactacaggcgcccgccaccacgcccagctaattttttgtacttttagtagagacggggtttcaccgtgttagccaggatggtctcgatctcctcaccacgtgatccgcccgcctcagcctcccaaagtgctgggattacaggcgtgagccactggctcggcctccaagtgttattcttaatcaaaaaaagaaaaagtttatctgactatattcgaccctgattatttatgtagcttcagaaagaggagttaaacacataggtgaagtcttccctccaccaggttctaaaatgtaagattcatggccttctgaaaacactcccttaccaatgtgaggctggaaccatagaacaggtggaggacttagtaggtattggctcaacatttaaagtacaatctttttccttaataggtattttcataccttataaacacatgtatgaccttggatgtccaattaaatcccaggaaaaaaggacagattcttgatgaaactaggcaaataatgagacagcaagtaaaaagggctccccagcagaacctccgaccagcttgcacactgacaggagtgcacactgaggtggagcctcaggaagtttgcagcggggaggagcctggcctcttctgttccaggacggaggctgggattcaatctatgaggcaggaagctgggtagcaggagtctctgtttctccttttttcccttttgcccaataaattccatttttcttacccttcaaagcgtcggtgagcctaatatatcatggctgtgtgacaagaacgcagcttttagctgaactaaggagaaagtcttacaataataatatgttgtcttacaagcatggagagtcagtacaaatatatttttctgaattctcagagaaaaatagaaattagacagcgtttgaaggatgtatttcacttacaagctgtagtatataaaattgaggatcagagctagaaaaagaaactgtgtaattatactccttctactggatgttgagtcagttttttgctttgataaaattatctaccaatgaggcaaaaaataaatccttaaaacaatgagatttaaaagtaagttgttatgctcagtactttataggagaacattcaagtaagtgtcagaggaaaacaaaaaccacctagagaagcaactaaatggctgtttaatttatatagtaaacaataatataaaaatggagaagaataaaattctgcattaggttcaatactatctcataaagacttgaccaatgtttcacctgggggcatatacctctccaatttcctattacagtctctaatctgtgagttaaatgtctacagttcctaaacaattcacctgtttttttttttttttttttttttttttttttttttttggacagagtatccctgtgtcaccaggctggagtgcagtggtgcgatcttggctcactgaaacctctgcctcctgggttcaagtgattctcctgcctcagcctcccgaatagaggagactacaggcatgcaccacaacgcccagctagtttttgtatttttagtagagatggggtttcaccatggtggccacgatggtctcaatctcttgacctcctgatgtgcccacctcagcctcccaaagtgctgggattacaggcgtgggccaccgcaccccaccaccattcatcttaatatgtaagattatgtaaaatgaactgagaaggctgagtcttttagaattgacctcatgcaactcacacagatgtgtggaactaatgaagaaatatggggcataccaaagaagcccaatttattttagcctcatccattttataaggcaaaaattgtcacagtttttctagaggtcacctaggaaatctaaaaaattcttatttttccctaaaaatcagaaaatatttactttttggaatttaagatataatttcagatgggcaaaaattaagtgttatcagaggagatttggtcactgtgataaagataggaatacaggtacagagaagaaaatggtggcaataatcccaatgacaatacaatattctaaaataagcatagaaaaatatatcataattgttagaaaatgtatccgtttcataattaattatgctgtacaaatgtttttttcttatttttctttctagcttcattgaagtatgattgataaataaaaattgtacatatttaagttatataatatgatgtgatgtatgtatacattgtgaagtaatagccgcagtcaattaacattttcatcaacttacaaagttacactttctctgtgtgtgtctatgtgtgcttgtatggaaatacataagacctaccctgttagcaaaattcaagtatacaatacattcttatcagctgtagctactatgctatatatgttaggtatccagaatttattcatcttttaactaaaagcatctccccatttttcctaccttctaatccctagcatctaatgagtttaaattttttagatttcacagataaatgagattatgcagtatatttgtctttctgtgtctggcttattttacttagcattttgttctctcagtccatcaatgctatcacaaattttaggatttctttcttttgtaaggatgaataatattccattgtatgtatatgccacattttctttatccactaatctgtaataaaggctattattcaaaatacacaagaaacccttcaaatttcacaagaaagcaaacaattcagttaaaaatggggaaacagtataaatggataagtcaccaaaggaaatataaaaatggcaagtaagtatttgaaaatatattcaacaacatatgactttagggggataaagcaattctatatattgaaatttcctttaacaaagaaagcaaatagaaaactttctcagaaaaacaaaactttagtgatacatcatcagctgacctgtcttgcaagaaatactaaaggaagttcttcaagtggagagaaaatgatgcaagtgagaaattcagatacacaataaagaagtaataaatgaaaaagaataaattaaagttaaaaactttttttattcttagtgatccataagataactgtttagtcacaagaaatgggtaattatagaatgtggacagatgaaattaacaatagcaatgtcataaggtacaggaggtacaatctggtagtatttttatgggatacctacactacgtgtgaagtaacaattttatttgaagatagacataaaatgtatataatcaattctaattaatttaaagatagacttaaaatgcatataatcaatcctaagaaaaccaccgcaaatttttaaaagaagtgatgagatcacatctcatgaggtgatgagatacaccaagagctgagacaaaaatgcaatcatagaagatgctcaattaaaataagagaaggcaggccaggcacagtggctcctgccagtaattccagcactttgggatgccaaggtggttggaccacctgaggctagcccgaccaacatgatgaaacaccgtctctattaaaaatacaaaagttagcctggtgttttggcacacatctgtaatcccagctactctgggctgaggtgggaggatcactttaacctgagatgtggaggttgcagtgtgccaagactaccactgcactccagcctgggtgacagagtgaggctctatctcaaaataaaataaaataaaataaaattaaaataaaataaaataaaataaaataaaaataaatgaatataattaatgattatattctacttcaacaaaagtagaatacacattcttctctagtttgtacaagacacactgcattatgggccataaatgtcttaaaatttttcaaagaataaagttcatacaaagtacacactcagaccacaataaaaattaaagtagaaataaatagcaggaagaattgaaaaatttttcaaatatttgaagacttaacaaaacatctaaatgcatcccaaaagaagactaaacagtaattaaaatatttggaattaaatgaaaatgaaatcacaacttattaaaatatatgagatacagtagaactagtacctaaatttatagcattaaatgcgtattattatgaaaaaagagataaaatcaataacctaagcttctgccttaagaaactagaaaaagaaaatccaaagtaaataacaagggaaaaaatatataaagtttagcagatatcagtaaaatataaaacaggaaaacaatagagaaaatcaatgaaacagaaagctgtttctttgaaacgatctataagcttgctaacatttagacaaactaataaagaaaaaaagagagaatgcacaactaacaaatattggaagtgaaacaggggtatgggttatgactactgattttgtggacattaaaaggatgatatatttactatattaaaaactctatactcacaagttcaataacctatataaaatggacaaataccttgaaagacacaatatgccaatactcacaaaagaaaaaatagataacatgagtactcttatatctataaaaggaattgaataaatagttaataacccacccacccctccaatggttccaggcccaaatggctttagtggtgaattctatcaagcatttaatggcaaaattataccaattttccacagacttttcaagaaaatggaattagagagaacacttcctaattcattctatgaggtaaatattaccctcttaccaaatccaatagacataaaattaaataaaatcaatatatcaatatctctcatgaaaaaagattcaataatccttcacaaaatactagacaattgaatctaactatgtatttattttaggtaagacagtatgcaagactgattcaatattagaaaattatctgcagaatttcctaaatcaacaggttaaggaagaaaaatcatgtgactgtatcaattgatgtagaaaaagcttatggcaaaatctatcacccatctataatttgagaaactctcagaaaactaggaattgaggtgaattttcataacttgacaaagaacatctacaaaacccctaaaactatcatacttaatgatgagaattgggatactttttcccaaaaaccaggagcaagaagaattttgttttttgttttttttctttcaccacttgcaaaatgaaaccaccactttggaagacagatgggcaatttcttaggcccatagttgctatactatatgtaaaaaaaaaaaaaaagtcttacatataatatagcaattgtgtttttttttgtttgttttgagatagagtcttgctctgtcagccaggctggagtgcagtggtgcaatagaaggatactgcaacttccacctcctgggttcaaacaattctcctgcctcgcctccagagtagctgggactacaggcacctaccaccatgcccggctaattttttttttttttttttttttttttttttgtattttactagagacagtataaccttttgatttgggaaattttaccatgtggcccaggctgttgtccaactcctgagctcaggcaatgcgaccgcctcggcctcccaaagtgctaggattacaggtgtgagccaccgtgcctggctgcaaatgtgtttttaggtgtttatccaccttatttgaaaaccatgtccacaccaaaactgacgcatgaatatatatatagcagctttgtttataattcccgaaactggaagaaacctcgaggtctcataattgatgaatggaaaaaaaaaaaactgtgatacgtcatataagggaatattacttcctaaaaaagtaaatgatctggcaaaagattcagtgaggaggtttaataggtgaagcacgtgggcattatttggaccagtcaaagtattctgcatgttaccacaactgtggaatcacgatagtatgcgtttgcgttttttttttttttttttttttgagatggagtctgctctgtcggccaggctggagtgcagtggcacgatctcggctcactgcaagctctgcaacccggattcacgacattctcacgcctcagcctcccgagtagctgggactacaggtgcctgccaccacgacaggctacttttgtttttgtatttttagtagagacggggtttcaccgtgtagccaggatggtctccatctcctgaccttgtgacctgcccacctcggcctcccaaagtgctgggattacaggcgtgagccactgcacccggcctgcgtttgttaaaaaacaaagaatctcacagcacaaagagtgtcacttaatatatgcaaattttaaaacaacaacaacaacaaagtaggtgttctggggatcctgggatggaatgcagaatgtgatagaaaatctaaagtactacaaatgtataaagccacttcactctagggagtgggaaaaacgtgctgacataagcatcttagaaaatggatgggccttctgtggtggctcacacctgtaatcccagcactttgggaggccaaggtgggcggatcacctgaggctgggagtttgagaccagcctggccaaaatggtgaaaccccatctctactaaaaagacaaaaattagctgggcatgatggcgggtgcctgtaatcccagctactcaggaggctgaggcaggaaaatcgcttgaacctgggaagtagaggttgcagtgagccgagatcaagccactgcactccagcctcagcctgggcaagaagagcaaaactccatcttaaaaaagaaaaagaaaaagaaaaagaaacaaagaaaatgcatgaagactgaaaggaagagaaactgcaaacaactcatgtgatctgggtggtgtagctgtttcctacaggaaatgggatagcgattctgatattgatagagaataaatgtatattggaactagacagttaagcaaatggatgacaaatgacaggagcctggtttctcactattaaagtgggaggttacatgtaagcaaggggagaaggccagaatgatcatgtgataaaagaattgagtcgtagacatcagtatgaactaacacttatacacattacatttagaaatatttatagttatgtgtatacacagctttgtatacacacatttatttctttgctctgtaaactaagacggtctctagaaccaatgatatcacagcagaaatgagcatatctaacactcaagtcttcaattcgtgggtttttgttcatgatccgggatccaggagttgggccctggggctgggcattgtgtagcctccgggatggtgctgagcatccattcccaccctcctgcagctggggacccatcccttgacttgggacccctggaggcaagaacatggtcacccactttaatcacatggtccctatcacataatcagagggcgctgtgggttttaactcttcaagctagatgtgtaaacaattcgacatagataagatatagtgactagaagtcttttatttattttgagagagagtctctgttgcccaggcttggagtgcagtggcacaaacaatcaaacaataaccaaaatccagaagaatgaaaaggtcaaatgctgtcaaggatggggagcaacaggacctctcattccttgtttgtggcacaatcagtttactgtacccacgaactcccaggcccaagtgatcatgccacaatcaatctcccaagtagctggggccacaggcatgcaccaccatgcctggctgattggttttatttttatagagataaagtttccctgtgttgtctaagctggtctcaaactcctgggatcaagtgatcctcctatctcggtctcccaaagtgctgtaagtacaggcatgaggtcctgcacccagcctggaagtctttatagataagttcaatttaactgtttctccatctgatccactcagccgagtttccctctcagtccaagggtgagaactgcagctcagccccatccaggatggctgcagatgacccagcgccactgccatactccagatgctggtcaacgaggaagggatcctgaggcctggcagcgggcgctctcaggaaccttgaagccctctaaacgggacccgccatccgtgcctgtcagaactggtgccgctacctgcacttggcacacaggcaaatatggccaagcaaccccaaactcccctcttcccctctgggcccaggcggcgctgaacctgctgctcagccgcatcctggcgactgcacagtgcccagagcctgcaaaccagcgctcagggcgcgagccaaggaagagcagggcctagagtgggagggcgtgtgccacacggctaccctaaggccgtcgggcccagccctgcagcctctaccgtgggctcagctgcagctggcatttgaaggtggcagcagcggtggcaaccccagaacctgtccgcgccaccagcaggcgaaccccagggtcggacaccgccactgcgcctaagtcaggcagtgggacctcagttgcaggatcgtgggaacctgctgcaaagcctcgtcgccgcagctgtacagggcccagtggtcgcaagcctgcgctgccagcgcgagccgaggaagagcagagccccgggtggaagggcgatgtactcggcgatgctcagcggtctgggcccagccctgtagcctctaccatgggctcagctgcagctgccacctgaacatggcacgtggcagaagaggctgcaaccctgaccctgccagcgccaccagccgcgcggatacttgggccagaagcctccagggagcctaagtcaggggttgggtccctggctgcaggaggccgggaaccgacgctcagcgccaccctggaggctgcacgatgcccagcgccagggcccagctcctggatctcaggttgaggaggggccaggagcggctctgtcaagcaggccatgtggcagggagccccccacgttccgctgtaaggagccctgccagcccgatagcgcctcagtagcaggtgccacctgcacgccgtgctgggcgaagcgcagccagggcggtttcctgcctcgcgtgcctcccaggtctgctgagttgcgcatgcgctgttgcctaacggttctgctcagctgcctaacggttctgctcagctgcctaacggttttgcgcagccattttctccctggagaggctggagtgtccaaaagcttggccgactgagattgctagtcgtgtcagggcgggtgcgggactgaagaagggcgagggcgagcggcggggactggggaagggcgagcagcgggaggcacgggctctctctagcaggtggctgcagccatggagaggctctgtgccgccgctgtcaagggccagacgggcccagagcgcccaagccccttcagtcagctggtctacaccaacaacgactcttacgtgattcaccatggggatctcaggaagatccacaaagctgcctcccgggccaagcctggaagctggagaggatgatgaagaagacgacaatggacctgaacataagagatgcgaagaagaggtaccaggccctgcctgagccggggctgcaggaggaggaggaggctgtgggaggatcgccccttcagagtgggggctgggggtcctggggacgaggggagcaggtggaggagtggtgggcagcggggcggccgtcctggccccgaggtcttgattttcttcccgggaaggccccccaggccttggatgggggagccctgcagggcagagggcccaggccaccttaaaatcaaccccaaactttagttagctgctttctccttcactcccacttcctctcacagagcactgtgtagagaattttaaagtgatttaacttacaaaattaagtacatacagggttttacttttaatgtacaggttttaaaagataatgttagatacattatgaaatggtgcataatgaaataattcccataatatattaacttcttggctaaaaattttttggataaagtccagtaaccatttcaatatcaatgaatgtctatgtaaatatattctttgctgagggaccttagaaggtaactttgaggtgggaagatggtttatgttttcgaatttaagaagactcatttttctgaagatgcaagttctttatcagttttacataaaccaaataaagttatcaacgttttaacatttttaaaattacacacgctgtcttttactattgtgatgacatttaacaaattttgtaacggagtagaaaagtcttgcccttctagatttcaaaatgtgctattaatttgcacaaaatgggccatggccaggcgcggtggatcatgcctgtaatcccagcactttgggaggccgaggtgggtggatcacgaggtcaggagattgagaccatcctggctaacacggtctctactaaaaatacaaaaaattagccgggtgtggtggtgggcgcctgtagtccccagctaattgggaggctgagtcaggagaaatggtgtgaacctggaaggcagagcttggagtgagccgagatcgcaccactgcactccagcctgggtgacagagcgagactccgtctcaaaataataataaataaataaataaataaataaataaaatttgaaaaagaaaaaaaaaaaaagggccagacgtgttggctcatgcctgtagtcccagcacttcaggtggccgaggtgggtggatcacctgaggtcaggagttcaagactagcctggccaatatagtgaaaccccaactctacaaaaatacaaaaattagccaggcacgatgtcgggagcctgtaagcccatctactcgggaggctgaggagggagaatcgcttgaaactgggaggcggaggttgcagtgagctgagattccatcactgcactccagcctgggcgacagtgagactctgtctcaaaaataaataaataaatcacaaattatttgataacagctgaaaagacaggtaaatgaatacaacacagtagaaaaccagaaacacccaaatatctaagaattcagaatttgataatgctcacactttatactagtagggaaagaattagtttcataagtgaaatgcctgctttttggagaaaactagatttttatgccacaaagtaaatttctgatggaatatagattaaatttttttaatatacaaaatgataaaagcaccagaagaaaacataaatgcctatttacacaggtacatttttatgttgacaacacctttctaagaagctcagaagcaagcagtctgaaggataattaagcaaaacaaaattaaattaaactgtaaggagaaaaaataaaaggcagcatacttgtaaaatatttactacacatgtatgtgcgtgtgtgtatacatattagatttttaaatcatcattttatagataattcacttaaatcaacaaaaaaaccctctaatttaaaattgagcaatttaaattagagatctaaattgcagatctaaaaatagtactttgcttctaatttaaaatttggaaaatattttcttaagatctgtaagtgacctatgcacacagaaaacaatatttagtgttcctggttacagaaggcatttaagttaaaagaggaatcaaatactgctttctacctacaaagtttgtgaggataaagagcagtgatatttatactactgtttaaagtttaagttgcagataacttttcaaatagacaatttggtggtaagtaccatattattaagaagaatccatataatgacttttataaatacatttcagtgaatttacagcatgggataatatgtgaccactgaaggtagaaatatgtagagaagtaggtgacatttgaaaatgtattttggtgtatcaagtgagggtaaagttcagtttcattatacatacacacagacttgcgttatctgaagttgtgtatgaaatatgataaaatttgttatttgagggcatttgttttaatataaaatgtttttccttttttttatctttgatttccacattgagcatgtacaatgctgttagaaaaagtttattattaatgaaataatttttgggaagagcaggaatataattttgcaccaataaaaataatttctcactttccatattttaattattattttttgtggattagtatattctgtgaacttttagcatcttcaaaagacaatctttttacctgtgcttgttgatttacatatacatcttattaggcacatatttttattgtatatagatttcttacacatatgtcaataattatagattagtgtagttttattattaagaaaataaaatagaaaatataagtgctttatttatagcagtttttttaaggtattgaacttctcaactgtatttatccttttaatcaatttatcacatgtaagctgaatgcctattatgtagaagatacattaactctcaagatcctttcatccttaaaaatttcacatttacctgctcagccttagcaaagtgagagatttaaagttggagtactaggaatgaatctcaattgaagcttttcctctcatctttaaaacaaaaacacttctgaagtaagaaactagtaaaagataactaccaaccacgattttggaaatttataacagctttaaatagtaatattaatcattggaaatacctaatttacatgcattctataaatttaaatatgaatttatatacattctgtaaatctaaacatggaataaaatgagccatacctacttgaatcccaagttttctttggcttgaagttttaaaaatattaaagaagtactttgttttaacagtttgtttttatttcaactctccttttgtatagcactcttaaaagctaaaatttctttaagtgttaatcctatgactaggactgccatcgtcctgttgtatataccatattccacttcgtggaaggcacggtgaatggtgtgatgcctccttatttatgtaccaataaaagatcgtttaaatttctgcaaaatatacttgtaacaaataatgacttataagtggcatttcaatgtcagagatgttaaaatatgagaaatagagtatcttagaattattaaaatagttttatctctaacctttaaaacataccacaaagtaggcataattttaccattttacttaaaatgttttctttgttaagtagtagaaataattacaatatctatcaatcactgagctgttacatgtgctaggaattcttcgaaatacattgcacagattctcatgaggcatcacagtgatgtcctgtgagataactgctgtattcatcttcactttattgatgagaaaattgaggcacagaaaggttaagtgatagctagaaggtgaaagactttaaagtaatattcaagcccaagttgaactgaatccaaaggccaagctctttctattcaaataggccactctttcattaatatagtgagtaataacagtgaatgaatgttgtagtttcttcaggagaatattaaatatttgttttgaaggcagagaaagagcatggtatttaatgttgacaattacataaatcattctatgttttgagacagtggactaaactttccttaaaaggcctctcactctcgtaggactgctctacactgggcctgtgccaatggccatgcagaagtagtaacacttctggtagatagaaagtgccagcttgacgtccttgatggcgaaaacaggacaactctgatgaaggtaaatggtagccagttctttcagcaggagatggatttggtttaaatacatagaataaaaatgaatttatctcattgaaatataactagtttgtgaaacctgtggaatatttatttatatttcctataatttataatttacttcttgctttaatactgacaggctctgcaatgccagagggaggcttgtgcaaatattctcatagattctggtgctgatccaaatattgtagatgtgtatggcaacacagctgtccattatgctgttaacagtgagaatttgtcagtggtggcaaaattgctgtcctgtggtacagacattaaagtgaagaacaaggtagacattaaccaatgttattttcaaaatatttgaaatccatttgttttaacattaacatatgtaaattgttttatatttggaagctcaaacattcctatttttctatgaaaatagtttgacaaaacttaattgtctaggattttgctttaaatattaatatttttacaagaactattagtatggcttttctgtgcattatgataaatatttaaatttgttaaaggtaaaacattttcaaatattctttcccacccaagtttttttttttctttccagttagtgtaaaactacaagaaagtaaaatttgcctgcataaattgagtcaacatgtaaaatttaggagacatgcagaaatctggatttcctcttaaaggattgaatcttgtgtctcttgagcccgtatgactgtttggtatgctatgaagacattctagttttacataaagcatatgtttccagtttgctactgtgcccacctagttacatcacttattcaacttacctattttgcctctgtaaatatttcagttatcaattcctctctcatagtacattttggtaaagatttcaagttattgaaggcagtttataggtgtttataatatatagtttatattttacattaattcattaataatggggttgtcttctagaatttagaatattttataaatgatgatttttctcatataaaccataaataatcatcttctattagaaggcctttaagcctttttagattaatcatggttatatttgaataggttatgcatattgcagaaaaaatattatatctttctccacagaattgtcccttaaaattcaagtgatttagtggcttctattttgctaagccacatacatgagttagaactttcattaataagccattttattcatacttctgatattttgccaaaaaatagtatcaattacaatagaaaccagaataaaaatggattattgcattttaagaagtagatatgcattaggatcctaggagtatcattctaatagagaataaacttttatactgaatttcttttctttttttctttctctttttttttttttttttgagacagagccttgctctgtcaccaggctggagtgcagtggtgtgatctcggctcactgcaatctttacctccctggttcaagcaattctcctgcctcagcctcctgagcagctgggacgcaggcatgtgccaccacgcctagctaaattttttgtatttttagcagagatggggtttcaccatgttgaccacgatggtctcaatctcctgaccttgtgatctgcccgccttggcctctcaaagtgctgggattacaggcatgaaccactttgcctggccttttatactgaatttctaatagctgagataaaatcctattgtctggtaataggataaaccccatggaccatttaagaatatgcaatcaaagtttatttgaagccaatctcttttaatttacagccacttccttagtgacccatttagagcaggagtgcctgacattggcatttggaatcttgggatcattgatagaagagaatcaagtgagtttgtatcacccagaggaaacctccatttttggggggaagctttcaaaactgcatccctgaaattctaatttgtcaaatgttaatgtttgccacaaaaatatactgtcaaataaggattaggtaaagttcaattcatttcttgaataatgaacatttaattcacagttttataacatttcttgaacatagataatggtggaatctgttggggtacagtgcttctggtaaggtaattattctttggaataaagttgaagaaacactgttctagaagtaataatttagattactaatttagtaaaaaataaagtatttactactatgtcttagggtttaaggatatagaggtaaaagatacagcccctgccctcaagaagctcttggtttacatgggaaacaataaaatcattacaatgtaatgatttttggagataaccagagttaatgtggtgatgcagaggctgaatgtttacaagagaaggtgcagtgcatgggaaagcacagaaaagtgagaaagaagggattgctattgatttactttccattgtttaagttcataggatattatataaggtattcaattcagctgagaaatatgtaatttcatgaattataaattgtttttgctgttttacaggctggccacacaccacttttattggccataaggaaaagaagtgagcaaattgtggaatttttactgacaaaaaaatgcaaatgcaaatggagttgataagtttaaatggtatagtagtttttttattaaaaaacacttgagtagtgtgctagagtaataacactcaagtcagaaatattaaattaataacatttacttaaaattattagattatacagaaaaatatcaagacaaattatcagttaggaagaaaagcaattatttggactggtcaacacaaagaacagtatacagtaggattttcttcttttattatactgactgattcttatttgtaatctgatgtttttggttgcattatcttctattagctaaagtggttctgtattagttttaagaagtatgaatttttagtttactttataattcaatattgaatgattaacacctttatagtatttttctaacttctgtttttcatacacttttaaaaaatgcaatatttgctgggcatggtagctgttgtctgttatcccagcaactttgggaggccaagtgggtagatcacctgaggccaggagtttgagaccagcctagccaacatggtaaaacctcatctcaatgaaaaatataaaaattagccaaccatggtggcacaagcctgtagtcccaggtactcaggacaatattattcctaatattgttttaagtcttcagattgctctcacttgtccgacttctagctaattttgaagtacaaaatattatatcagactaaggaggaaatagataattcttcacttaaaactttgcctcttttagattagtgaacagaacatattttcttgcccctcagtggactttatgttagccaattctactatgccatatcccagtgagacatgagtcttttcaccccttccttttagccttggtcgtgatttacaaggataaacacttgagcactcaagatacttaacatttgttaatacatgtaaatggttaattctatactgacaggcacatattaaattggttcattcctaataatgaagttatgtctgttattttagcacagccctcatgcttgccatatgtcatggatcatcagagatagttggcacggttcttcagcaaaatgttgacatctgtgctgaagctacatgtggaatgattgcagaacgttatgctgttgcttgtggatttaatctctaagtgtttacatttaaaggctaggtgagattttatagtttgtttcaggtagtttttgaatgacagtgagttagttcacttcatcagccagaaactaggcaaaaagctagactagttagaaagattaatggctccaggattctttattttagggctttagggacgctaatgttgtctacttgatttgaagtataacccctatgcatgggataaatataatgtcacaattttggtttttctaattagttatttgggtctcaaaatgtccactttaagcagaaaacctgatagtgtccccagggggctgtcttccataccttcattcttgaattttttaaaagaatctgaacctaagtccaaggaagacattccttttgtacaagtcagaaggattggggggtgggaaatggccattctcttcattttgctgtttccattgattctgttgctgcatcgttgccattgaaactgctcctgcagtctggtaatgattgacctttgtgaccaggatgcccttactaacacagattcctcagtcttcatggtatagacttccaagttatgacatgtttttaaagttcacgtacatattctcagccattgtttccaaagtaccagcaccccactctggcagctagaacttttagctttagccacacacatagtgagcaaattgacccttctcctcacactcaaaacctgatgtgaaacccacatcttagcctggacatggcctagaccttcatggtaaattatcctttgagtggcttttttctattttctctagccaatattagttgtggtagtttgaaactgtaagtcaggttgaaataatgttacaggaagaaattagagatccattttgtctttgttaccagatctatatccctggccctttatatcctgtgtagcaccattttgtaggtagtggaaggtctcatcttattctataaaatcccatgtcatctttcccaagttgtagtgggttccaacttgtggttgtcccctcaagtgattcttttttcctaaaagtaaaaatctcccatgctacttacatctccacctcgagtttctaaaatattttcaaatgctgcatcaccatgaagccattcaatagacttcactaaatctcaagtaagttggttagatttaacagagctaagcctcatccatccctcatcagtcttcacgtataaaagtaaggatttgtgctggcttcagtggtacatatagtaaaattaagacaacgttgagaagatcagcatggtccccgcacaaggatgacatagaaatctgtaaggtgttgcatatttcttgcagtccccaaaaggacattttactactttctaactagctccaaggaaatggtgtgagtcaaagcaaaatgggtgacacccagtattgcaattgtgattttcatacaaaaaattatttacataaggtgatctatgaaatgagatgtggtaacacataggatcttgtgtgcaatattttgttagtagggatctcagaaatgagaaaataccaacttgcatcttctttgtggaacttacaaaaaataaaggtagggttttgtcttccacagcagctggaaatgaacatagtgactaagcatcattctaacaaagatttgttggttcagagtttaaggaggtagataaagagtagtagtagtccaagccagatgctgacatctattagttttctgcccttggtgtgactgatgagctcagtaatagagtataattaggttatctgatttaatgatttaatatatttataaataaatttcattacaaaatataaaatagcttagatgctctgaattacaagccacaaagaatagaacatctaatatccaaaagtaggaattaataacagaaaattgcaatatttgaatattataacctatgaagaaaaacatgttttttgtgtcttatgtttagtgggaattaaattttggtggaccattggtcctcccctatgttgcccaggctggtcttgaacttctggattcaagcaatcctcctgtctcagcatccaaaagtgcttgcctcacaagcatgagccactgcaccaggccaatatattgggttttattgggaattttaaattgtttcagcaataaggttgaagaacaaataatttttttgcttcattttttattttaagcattttaaaaatgttatcttgttaaatctttataataacctagtgaaataaggccctaaaatcctcatttttagaagacattgagtctaagagaagcaacttgttcaagaaaagatacctgttggtagccatgctaggacttattccgagttagggacattttccatatgtcaagctaactttagttaatttactgagttatactgccctcactttatgagtgttttatctttctttcttctttaattagaagcttaataagttcatagagcttgtatacttaaagtctatggaaaaagtaatgttctgatgttagctctaatattgtctgaaatactctaagaatgtaataaatttggtaaatttttttatatcagtgttaaaatagtgattttatttatttcatttttatacatagcattcatcaacaacttttggaatataaacaaaagatatctaaaaattctcaaaatagtaatccaggtaagacctctgatagtaaactactcttggtggtgctaccataagattataggagtgttaatcacaaaagagctattagaaaagcaatgtgtaagtagcatgtgtttacatatagacctatatgtaagtgtttttttatatacaaagctttgatttaattttttagtttataattcagaattcattaagaatttagttgtaggtagtttataatctcaaaaatattatctgaaaaaatatttgtttaattgtggtccctaatatcctatataatacttttgtataaataagtaaaacaatttttaagtttatctatagtatgtttcccaaactgtcataaaaatttatgcttgttataaaatgtataatccttggtgtgattgatgagctcagtaataggggattatcagcttatccaatttaatgaattaatatatttataaataaattttattacaaattataaaatagcatcggtgccttgaattacaagccacaaataatagaacttctaataatgaaaagtaggaattaataacagaaaactgcaacatttgaatattataacctataaaggaacacagttaactgtttaataaacaaatatttgtttatgtttaataaacaaatatttgtttatttaacataaacaaacatataaaatgtttatttgttaaataaacaaataaataatttatttgtttgtttattaaacataaacaaaatgtttatttgttaaataaacaaataaataatttatttgtttgtttctttattgtagagacatggtctccttatgttacccaggctggtcttgaacttctgggctttatttaatttttacaataaatgatttgcatttagaaaattagaattaattacagttgagtattgagcaacatgagagttagggtgctgatccccccatgcagctgaaaatctgctttataggaaaatctgtttcttttgactcttccaaaactctacaacattctactgttgacctggagcctgaaaaaaggtgaaagcttaagcagtcaattaacccatagtttctattttatatgtactatatactgtattcttagaataaagtgagctggagaaaagaaactgttataaagaggaagaaatatattcactatttattagatggaagtgaattattatacataaaggacttcattctcattgcctttatgttgagtaggctgataaggaggaggcaaaggcgagatttttcttagtatcttgcagtggcaaaggaaaagaaaaatctgtctattagtgggctcctagagtgagaacccttattcaaagatcaactgtgtggcatagtgacttgcgtcactaaaaaagtaactatctttagaatttggaactcaataatacttttcttgcaccataaatgaatgtcaataagaattaacataacttagcaaggatgcatcagtaccaataggagattatttttcaaagatacctactgagtgcagaagtcagaaaagcaattctttgttgagaagcacaggttatgttacatagtcttgtaccaacaaggtctcactattatcaatttcattccctctaagttgaaaccaaataagatatatttacttcattagaacaagatgtgttgttctatctgctggataattagtgtgttgatagtaattttgttacaacaagttactctgttcctactagccaaaatattatcattataaatatacaactagctcaactctaggctcaacgaattataataaaagtggaaaaaattttcacaataacaaaagtgctactgtgatacctaaatgtgacagaatacattgtacaatatgaactgtatgaacacatctttaatttattacatatttatcaaaggacttctataagttagattttgcaagttgcaggagaccaacatggaatacacatagtctgggtctttaaggtgctcataatacagtagagctgtctctgttgaatttcttcatttttccaacagaatttcctaactatgttttctatttgtgtatccacttgtccacttaacaaataactgtcaggtatctttaaggtactaagcatctttcttgttattatcattgtcattttttattatttactactttattaagttactaagcatttttcttgttattatcatcttttttattatttactactttatttagtgcttactctgtgccagaacccctttgggagcttataactatcacttattatgtcattaccatattcagtatgtgtcagacattttatatccaacgtgaagaattaaagctttaaaaagtttggtagtgtccaggagcggtgactcactcctgtaatcctagcactttggaaggccaaagcgggcggattgcttgagcacaggagtttgggaccaccctgactaacatggtgaaatcccatctctactaaatacaaaaaattagctgggcctgggtggcatgcatatgtaataccagctacatgggaagctgaggtaggagaatttcatgaacccaggaggcggaggttgcagtgatctgctgagatcgtgccactgcactccagcctgggcaacagagcgaggctcttgtctcaaaaaaaaaaaaaaaaaaaaaaaaaaggagaaaacaaaagtttggtggtatttaaggaaagcaagctgaatgagtagaagttttccaggtaaagagtcagaaggatgatatttagcagaaggaaaatttaaccagactgtgtgtttggcagaaggaacatctgaaggaacacctgacgaggctgcacccttggcggaaagaacacctgacacggctgaaagcttggtggaaagaacacctgacgaataggatacagtgaattcctcttcaaagattttagcctgtaaacatcctttaaaattcaagaggggggaagattaagtacaatgagttctgagttcctcatcaaagaacaaatatgtcagtatgttcagcttctccgttctttgttctccgttttaaagtttaacttcctcgttcgttatgcctccttgcccctagtttcattaaacaacccccttctagcctctaacacctgctttgtctttagtcattcttagtaacctgctctgtccttagtcatccttagacacctgctctgtaactgtctttcccgctgaaactactcaccctgccactccagctcatacccctgccctctttgaaatagccaatctgaattggcttagagtgtgcagtccaaccctatccaatagggaaaagacacaacagtagggactagctgcgttagaaataagaacactttcccctcccttgtccggtgtgatcttgcctttgctccatctgcaagaccactcttccatagaagtaaatttgccttgctgtaaaaacttgttgctggagtgctgacggttctttgtggcaccgaaaattattttccaaaaatttgagggcccacccaacattcccattctcctctgggggagggtccagtcctctcccttgaggaggtgcaccccgctgcctcgttgcagtggccataaaggtaaggaatcaagactcaactggtgcgattaataaacccgggctctcagcaacgtggaaagaaacaggccagcaactctggggaaaggatcttcacataccgtggcgaccaggtaactgtgcacagaccgaggtaagaaatgtcgcaggggtgacaaagtatttccttggtggtcgggatattctggaggttgaaagtgtgtgtgaatgatcacaagcactactgcttgtggtgctgtttgtgtggatgatactaagcattattgctgtgaggagtgagtgggtcctatctgcggttttttatttgaataaaaaacctttgaagaggaattcactgtatcctcatagggctcagggcagatcttgctgtggggtttataccatgatgccaatgcaaagagggacggaaaattcctgggagggaagcagccagagtggatgaagtgaaagaagggtgtgaggagcctccagcaggtggggataaaggatagggaagaaatctctagcatgcgggattgagcctaaccaggacctaacatgggaaaagccccaaataagatagggagcaaaaaagaagaggatagtaacaaagacatgcccctcatagtcccctgggtctcatgttaaaatattggaaggataatgagaggactaaacataagaaaaagcattagaggataaaatattgctgtttcatttggacccaaggtcccattttcaaacactcaatcttctggccaaagtttgggtcgattgagaatgtaatatgtcaacttctaattcaatatgttaatgataaaaatctggtttctcaagaagaactagactatgctctttgttggagacagggacctgtctttattcccataaagacaactagggaagaacccgatccagtatctcaaattgaaaagtcagacgagctgactcccacacctaaagccaccacatgggatcccctataccattttgccctgctcagtacctctgacccttcccctcgggcagctgctgccaccccatatcccaccccagatccttctcctgctcacgctgttactcctccttacaactctaattcttgggagttatcatcccatgagcctgtcccctgtcagcttaaatacctctccctaaagggactccagcatgaggtacagcaatgtaaaaaggacgttcagaacttcccttttccgtccacacctaaagagtcagccccaactctcttccccttaaaagacatgccacaaggaggaggagccattgtatttgtgaatgctcccttgaccagttcagaagtctgaagtttgaaaaaggaaattaagccattgttagacgacccttatgaggtggcagatcaggttgatcaattcttgggacctcagttatacactttggtcgagtttatgtccatcctaggcatcctcttttcggaggaggaaagaagcatgatctgatccgtagggctgctatggcaatttgggaatatgaacacactccttgtcaaaacgttcctaccacggaccaaaaattccctgcccaagatccccggtgggataataataacgcagctcaccaagaaaacatgcaagacataagggaaatgataatgaaagaaactagggaatcagtaccccaaactcaaaatctctccaaagcatttgatatacaacaggagagaggtgagtggaccatgaaattcttagacagactaaaggagcaaatgagaaaatatgcaggcctaaatttggaaaatcccctgggacagggaatgttaaatctccatttttgtcactaaaagttgtccagatgtctctttttatttttttgagatggagtctctctctgtcacacaggctggagtgcaatggtgcgatcttgattcactgcaagctccgcctcccaggttcactccattctcctgccttagcctccccaagtagctggaactacaggcgcccaccaccacgcccagcaaattttttgtatttttagtagaggcggggtttctccgtgttaaccaggatggtctcaatctcctgacctcgtgatccacccacctcggcctctcaaagtgctgggattacaggcatgagccactgtgcctggccaacgttgtccagatatttcaagaaagttacaaaaattagaagattgggaaaactgacttcaagtgaacttcaatgagaagtgaacctcaagtgaagtaacctcaagtgaacctcagagagactcaaaaagtatctgtgaagagagacgaagaaaagcgaaaacaaaagacaaaacttatgttattcaccttccaacagatggctccaaacccatgtacccctaaacagagcttccagtgggccagaaactataaaggttccaaaccctcctttaaaggacccaagcctccattgggaggatcaaggctctcgtctaccagtccatctaaatagcatgggggagtaaaatcaaagaatcccagaactgagagtggggaagggcaaggtaggcactacaaatgtggaagaacaggccacttcaagagagaatgtcccaaattagaaaaggaaaaagaagcccttccactcatggcttttgaggaagaataatggtgtcaggggttctgtctcttttatcttgagtcccaccaggagcccttgataagtctagaagtgggacctaagcatgagtttataacctttttagtcaattcaggagtggctcgatcctctgtttgtttcccccccatctaatattgcctgctcttcagaggaacttttggtgtgtggggtaaagggagaaggatttaaagcaaaaattttagaaaacacagaagtcagataccaggctcaatcagctcatattcagtttttgttaatccctaaagcagggactaatttactaggcagggatttaatgttgaagttaggcataggcctgcaactcagcacaagaggattcctcacctcattaaagctactcaccactgcagatgaaaaatatattaattctaatgtctgatccaaagaaggaaactgagggaaactctgagtccctccaagcacatcaaggtaaaaaaccccagggaagtagtaaggaggaaacaataccccattcccctagagggtaggatacggttgaaacctataattgaaggtcttattaaagatgggcttcttgggccctctatgtccccttataacaacccaatattgccagccaagaaattagatgggtcatatcggctggtacagcaccttagggctattaaccaaatagtccaaactacccatccaattgtcctcgatccttacaccattctcagcaagattccatataataatcaatggtttactgtaatagatttgaaggatgctttttgggtatgtctcctggctgaagataggccagatatatttgcttttgagtgggaggatccccattcagggtagaaacaacaatatcgatggatagtcttaccccaagggttcacaaactcccctaaccttttcagtcaaattttagaacaagtattagaaaaagttatcatcccaaacaaatatgcctgctccaatacgttgatgatattcttatatctggtgaagatatagagaaggtagctggcttctctacacatattctcaaccatctgcagttcgaggggttatgagtctcaaagggaaagcttcagtatgtagaacctgaaattaaatatttagaccacttttaagtgcagagaagtgaagaatagggcctgaacgagttgagggaatcgtgtccctacccttgcctcaaacttaaacaagaactcaggaaatttttagggttatttggatactgctgcttatggattaactcacatgcactaaacagtaaaattctatatccaaaacttgcccaggggaagactgaccatttcctgtggacttctgaggaagtccatcaggttgaagagctgaaaaaaggcttataacagcccctgtcttagccttaccttccctagaaaagccattccacctttttgtcaacgtggataatggggtagctttaggagtgctcacttaagaacatggaggccattggcagaccatggtggccttcctgtcaaaagtcttagatccagttacttgtgagtggcctcaatacatccaatccattgtggctacagcactaatggtcaaagaaagcaggaagttaacctttggaggaaaattgacagtaataacgccccatcaagttagaactatcttaaaccagaaagcagggaggtggcttactgactcaagaatcttaaagtatgagactattctgttagaaaaagatgatttaacattaaccactgataattcccttaacccagcagttttcctaataggggatccaaatctaaagagatagcacacatgtttacatttaactgattaccatacaaaggtctgaccagacctaggagaaactcccttcaggatgggatgacacttatttatagatggttgctcccaggtgattgaggcaaaaagatgcaatgggtattcagtaattgatagggaaactcttgaagaaattgaggtaggaaaattgcctaagaattggtctgcccaaacttgtgggctgtttgcactcagctgagccttaaagtacttgcagaaccaggaagtagccatctataccaattctaagtatgcctttggagtggctcatacattgggaaaaatttagactgaacgaggtctcattaatagtaaacatcaagatcttgttcataaggatctaatcacctaagtattgaataaccttcagttgccagaggaaatagtgattgtccatgtccccagacaccagaaaagtctttcttttgacagtccaggaaatagcctagcagattacatagggaaacaggctgccatttcttttaaaacatctatttttcactgaactctttaccttcctcctcctaccataatctccattttctcttccactgaaaagagaaactaataaaaataggtgctaaagagaattcagaataaaaatgaatattgtcagaccagagggaaatgttgttcaaaccctttatgagggaaaacttgtcccaactgcatcaagggacccactgggggtcccaagccatgtgtgacacagttctgaaagtttttgggtgtataggaatttatactctgaccaaacaggttacagacatttgcttagtatgtaagaaaactaataaaaaaactataaaaagattaccccttgggagaaggagtccagacttaaagtatcctgattgattacacagagatgcctccaataggtcgtctaaaatatttactagtgacagtagatcaccttactcactgggtcaaagctattcccttttcaaatgtgatggccaatgatgtagttaaggccttaattgaaaatatagtgcccaggtttaggctaatagaaaacattgactcagacaatggaacccattttgcctgaaactattacatttgatccttgccttgctatacctttggagacttgtcaagttgaagacagctctcaacttcagaaaagtacctctgtacttcctggctctcctcagactggacattagagaatttggatcatttagtctgcgaaagtttcaatgaagaccccagtgtcaactgggagtcttgcccccttgacacagagcttttatgatgtagttggtccaactacgtgcaagtgagagcaaggatggactgccccaacaagtagttgtaattcctaaaatcatacattcattttactaaagatatagctccccctaactttcaggtaaactagtgcaacccaatacaggttattatttcaaaccctcaaagatcttccccttctctaagccaattcccttctttaagctggttttatgatatgggggctgagttttcagaaacggaccctattggatcttttggaatatgcttcattgctcccctactgcctacagcttcccctaagtcttcttccaaaaactctcacaatgaaactgttgttcctcctccatctaatgagaagaccaaggtagctattgtagaagttaaagacctaaaacaaactttggtaactgaggcaggatatcaagatgtgaatgcctggttggaatgcatcaaatactccgttcgcactttaaacaaaagcaactgttacgcttgtgcacacagcacaccaaaggcccagattgtcccctttccactaggatggtccttcagtcgaccaggcatggtctgtatggtagctcttttccagggttccacagcctggggtaacaagtcatgtcaatctctctctctgctatatcccaaagttcaacaccctgcaggtcagcctccaagggccatccagcttctgtctcccgacactaagttcacttcatgtctctcacaacaaggaggaaacttagcattgtttggaggcctaaaaggatgcagtaagcttaagactttccaagagcttaccaatcagtcatcgcttatacacccctgagcagatgtatggtggtattgtggtggacctttactggacactctgccaagtaactggagcagccctcgtgctctagtcctgttggctatacttttcactctggcatttcatcaaccagaaaaagggaaaacacaacattgtaaagcaagggaagtcccttacgggtcttttgactcccacatttatttagatgctattggaatcccatgaggagtaccagatacatttaagcctaagatcaaatagctacaggatttgaatcaatattttggtgggtgacaataaaaatgtagatttgatgaattacatctataataatcaacagtggtttattaattccaccagggatgttgtcaaaggaatagcagaacaattgaggccaactagccagatggcctgggaaaacagaatggccctggatatgatattagctgaaaaaggtggtgtttgtgttatcattaaaactcagtgatacacctttatccattgggggcaaacaacactgcccccaatgggagcataacaagggccctacaaggatttaccactttatccaatgaattagctaaaaattctggggtcaataaccctttctccagatggctagaaaggtgtttcagtaaatgggaagaaatcatagcctcaattcttacttctcttacagaagtaacggctgtactcattcttgttgggtgttgtgtcataccatgcatccatgggctagtgcaaaggcttatagaaacaacactttctaaaacctcccttagctgtcctccaccttattcagataggcttttctttttagaggatcaagttgaaaaaaaaaaaaaagccaagacatgttaaaaaggtttgaagaggaagggctataaaaattgaaagagggaattgtagaatacagtgaattcctcttcaaaggttttagcctgttaatgtcctttaaagttcaagagagggaagattgttaagtacagtgagttctgagttcctcttcaaagaacaaatatgtgaatatgttcagcttctctattctttgttctccattttaaagtttaacttcctcattatttatgcatccttgcccctagtttcagtaaatgaccccctcctagtccctatcacctactctatccttagccattcttagtcacctgctctctccttagtcatccttagtcgcccgctctgtaaccatccttcctgcagaaactacccaccccgccactctggcttgcacccctgtcctctttgaagtagccagtcaaaattagcttagagtgttccgtccaaccctagccaacaggggagagacacaaaagtagggactagctgcattaggaataagaaccctttcccctctcttatccagtgtgctcttgccattgctccatccgcaagactcacccttctatagaagtaaatttgccttgctggagtgctaactcttctttgtgtcaccaaaaagttatttccaacatgaaggtgcacccttggtggagggaacatctgacgaagttcaatgtttggggaaagcaatatctggaaagattgaacagtcagcaggagaaacacctaggaaaattacaaggcctgtgaaagaaacatctgagaaatttgcatggccacaagaaaggccttcaaagaccacacgggaggaaaaagaaacatctgtaaagactgaatgagtggcaggagtaacatttaataaaattgaagttttggaagaaggaacatctaagatgatcacatgtcctacaaaaaaacagctacaaaagcaagtacaaatggtaagatgcttgagtgaactttgtagagtttattggcactctgggttgcctaatggaaatagtgtggtatgggagtagttgggaatggcttgaatgtctagataacgcaagcttaggcaacacattttaatagtgtagaaatgagtagatcttattctgtaggccctggaaaaattcccaaaatagttctggctgtaaataatagatgaactaactaacaattgctaaaaccatagaaaccaaagttgttttggtggtacagggatgttataggatctcactcacccccccattattagttgtgctattggcagtgttttgttcatgtctcctttcttggttggctaattagcaacagctccaatcatcatgctatctcaagacaatatctgaaggctgggagggctgcttttgttcacatttttttttaatgggagaaaacttggaagctttcagtaatcttcctgtaacattttattggctggattataccacatgcttatttctataccaatcactaggaaagcaaatgtaattactgtgattagcttacaataatgatttttcttttaagatgggatgggtgtaatggaataataaatatctaaatgagcatgtgtttctgcagcaataaagaataaataatgactatgcataggaagccagcaatgttttctgcaggaattcagtggaaaagtttgagcaggggagtcacaagattagatttgagtatcagggcattctggtcatggtataaagcagagattggcaaagttttcctgtaaagtgccagatagcgaatatgttgggccatgtggtctctattacagctattcaactctgccattgtagagtgaaaggagtcatagataatgtatgggcaaagaggcatgattgtactccaataaaagtttgtataaaaaaccatttagaaagctgaatttggcctgtggcctatagtttttggcccttcatatagtagatagatggaggataatcacgtaaaaagattgaaagattaagcttttgtagtagttcatgtgatagtcttttttttttgtaaacaatctgtggcctagtatcaatctattatgaaagtttgatccatcaagggtaaaatgaataaagttcagaagctcaatttacacatttaaacatgtaggtccttctttggcattattttattttgattaatttttttaacttaaaaaataagaacagtaatttgtagggtttctttttccctgtgaaagccatcagttaaggggccacgtttaacaaggaaatataaatataaaataaataagtttgtatttccagtggcactggaaagataaagcaaaggcagaaaagaggtgcagttaatatggtttagtgataattgagtttaaaaagctaggggacagataaaatctcaggtcattcataagttttcagattgtgcacaagcatttacaatgctcatggggaaggagtaggaatttgtcaggttaacagggaagtgcaaacagtcatgggacagaccaacagttttctttacatattgagttcaatgaaacatttgtgagggatactttcagtaggtaattggattatatgcatttctagctggagatagaactctggttgaagatgcaggcttagaatacctttattataattattaggcaaagccatagatctcaatgagcttatccatgaggcagaagatgtagaataaaaggaaagccattgacaaaaccctgggaatatcaacatttcacaagagtcaaaggacttggtaaaggagactgagcagtggttaaacaaatgtaggagaggagtctgagaaagtgatgttgcaaatttcttttaaatgtgagaatttcaagcagtaaaattactcaaaaggctactggatttaacttacaagttcttcagtggtaatctgttcaaaagaattattttagttgttaggtatactgttgatgtggttgataattctggtatccaagaagaaatctcccaagatcctacctaactttttgtaactaaagcggcatacatacacaggtagtgggaaaatgtctagactggtgagtacacataccaacatttttccagaattttctgcctccttattataccacttgagtaaggggtttagaaattttaggctctacttgggaatttgtctatttcttttgcagttctatcaatttttgtatcatgtattttgaagcatttatgttattatatacataaatatttaggactgttatgttttcttgattaattgaaccatttgtcactatgaaatgaccttgtttattgctggtaatatttttgctatgaaatgtactttggtattaatacaaccactcttcctcagccttcttttgtagtgttagtgtgatatatctcgtttcatcttttaaccaatttttgtctttatatttaaagtttatttcttatactcattatacagataagacttgctcttttatccattctgataatctgcctttgagcagaggtttttagaccagtttaatttataatgtaattattgatatgattagagttgtctgtcatcacactgtttgatttctattagtctcagatcttctttgctttgcttttttcctttttctgcttccttcagactagtttagtaatttttatgatttagttacatatctgtatatgcataacttttttagttattaatctagttttacatttctttacaatttagtcatatcttttttggtataagtttatttggtattaggtataactctttgctgtcttagtagttgctttaggatttataatgtatgaatttacctcatcacaatccaccttcaagtaatattatatcatatcatagatggtataagaaattacaatcatattttcacttcttttctatcaaccagatcccagcctagatctgtgggattatggctttcgttaagtttagaacatatttagccaatttttcctcaaatttttgattctgcctctcctcctatctctttggggacttatatactacctgctggaagtttgctcatcgttcactagtgtctcaaatttgtgaatcttttctttcatgatggcgaattaatctatgctcatatctactcagtgtagctttcatctccagcattgtaatttgtatctctaaaagtgcaatttggtttttaaaagtatcttctattgctttatttatcttcttgatttttatagttgagttacttataaacagcttgatccttttcatttttctttttatggtgtgagctaactccccatacctgagacaaggcctttctgagtattcattttcctgtgaagtctgagttttcccaggcaaatctataaaaacagacactcttcttggcactgtatgagtaccaggtgtgatttcctctaattttataagccaacccccacccccatccggtttgttcttaggtagttttctatctcacatgcaattttcaaaattttgctaaatactgacagggggtttcttgccgttgcttctgtatctctctctcctcctcagtgtttgttctgtaatatctgcctgctttggttttactagactctaagcttcatcagtgtaaccaagagagtctggtagatcccacctcagttttttcttcctgtgtcatgtctcggaatctctgccaagacaggaagctgaaacattcagaaggtttgctttctttcgtttttttattttctgtttttcagggattattatcttctttgcctaatgtccagtatctgaaaaattgtttaatgtattttgtgtgttttgtttttagttattttagctaagaagaaaaatcatacctgttgctctcccttggctagaggaagactacactagagtttcagcacatgccacagactggctaaaatgctttccttccctgtttgctcaactgcttccttttcattcttcattcctcagtgtagctatacatccctcgggggaattttccatgagcctagtatagatctaaatcttagcaatctgttttcttacagtatttatctgaatttataactgtcacttttctggggctttgtcttttagcacattttaagttaaacaaatgcagaggtttttgtttttttctgtttaatctgcagagcttagtataatgccttccacgtggcaggcaatcaatatatatttgatcagtgtatgaattaatgattgttaaaatatgcagttctctgtatcccaaaagtactaatatattttatttctatctcctccttgagacacattcaactagcctatcaaaaatcttggatgcagttctttcttgtgaaagagcaagggaacttaaaaaatatccctgtgggccaggcgccatggctcacacctgtaatctcatcactttgggaggccaaggcgggcagatcatgacgtcaggagatcaagaccatcctggctaacacagtgaaaccccgtctctactaaaaatacaaaaaaaaaaattagccgggcgtggtggcaggtgactatagtcccagctactcgggaggctgaggcaggagaatggcatgaacccgggaggcggagcttgcagtgagtggagatcgcgccactgcactccagcctaggcaacagagcgagactccgtcaaaaaaaataaaagaaaaaaaaatccctgtgaacaacttacagcaaaaatgaaacaaatgaaaaataagcttcgtgtactacaaaaggaactaacagaagcaaaataaataaaatcatagagaatcaaaaacttaaaagagaacaagagctctgcagtgtgaggtatgacatactagtatataggatactttttgtactagctgacataccttctgaggtttaactggagaaagaaatctctgtcttgtagagtgtcaaattcatttaaataatacaatttcttaactgtgaatacatctcctgataattaaatgcatatttatttaaatcacaattttaatggctgcatagaaggccattatttggaaaccccattattacttaacaaattaattttttttatttttaattttttgtgttataataagtgctgcaaggcataactgcatgtaaatctttttctatcattctaattattgacttggaataaattcttcactataaaaatatttggttaaattataggttgctctacccccaataatcattttcctttaattatacacttgtaatcttaatatgcatggagtataaagaaaaatataggtaatttatgactagtatattcaacatctctctctcctacataaataaaattaattcagagttgtacttattatttttatattttaattaaatatattctgtgttattctaaaagagatttaaaatttgttgataaaatgtataataatcaacaagatacatttaaagtattactaaaaaaagaaacaaaacatatatgggataacagatattagatttttcagcctagtctcagattttaatataattatttttaaggatacttgccttattttataaagatgaatatttatgtctaatgaatatgtaaacttgtttacaaaaagtaacgtcattttaattagttaactctaaatgatctgtccttattgaggagtaattttgactgttatatttttaaaataataattttcaacttataattttactggataacttccagtattcttttccataactgttgttgaagttactggtaacagaatctttctaactagaagatgttctttctcattatttttcaagtatgtgcatcatttggaagagagttcagtaataaattaaatacctcagaactagaaagaaaaaacatattcaagaatatagaaattttactggaataataaaccaatatacgaagaagtagatctcaaagtgaattctatgttctaacaaaatgaattttaagataagtatatttaatggcagattgactttaaaccaagaagaagagaagagaagaaatgccaatatattaaatgaaaaattagggaagaattaggaaaaatcgaagagcaacaaaagaaaaagttagaagtgaagcaacttgagctcactctccgaatatacaaaatatggaattgaagactgtaagaagtaatttgaatcagctcaatcaatcgctggtaaaaattttatatttctaactttatttcatcaatattacttttaatatcccttcgatttagtatgtattattcagaattatgataatgccgctataatatttaggtacaaacttttgtatatttcattcataagttttcatttcttttgggtatgtacctaggaatggaattgctgggtcataaggtacctatgcataaccttttcatcaatcacctcacagttttccaatgtgtgcactattttacttccccaccagcgatgtatgaaagatctaatttctctacggcctcaccagggtggagtgcagtggcgcactctcagctcactgcaagctccacctcccgggttcacgccatcctcctgcctcagcctcccgagaagctgggactacgggcgcctgccaccacgcccggctaattttttgtattttttagtagagatggggtttcaccatgttagccaggatggtcttgatctcctgacctcgtgatccgtccgcctcagcctcccaaagtgctgggattacaggcgtgagccaccgtgcccaaccatttgtcattttttattgtgggtacactagtgggtgttaagtgatatctgcttgtggttttgattttgcattttcttgatggcttgtgatgttaggcttttcttcaagcacttattggacgctcttatatcttcttcacaaaaatgtctatttaaatattttgcctatttttatgtattttttctttttgttgttgagttgtaaaagctatttgtgcattttggatacagatttctaatcaaatatataagttgcaaacattttctctacttttctggttgtcgttttgttttctttgttacgtcctttgaaacacaaatgttcctaattttgatgaagcccagtacattttcttttatcactgtgcttttggtgccatatctaagaaactactgccaaatcaaaggccataaagatttattgttattttttattctaagagttttatagttttgcaattcagaaacataaaatcaaatactgcatgttcttacttaaaaatgggaaataaataatgtgtacacatgaacaaggagtgtaaaatgataagacactgtagactcagaagggtgagaaggtgggaggggtaagggtgatgagaaattacttagtggatacagtgtacattgttccagtgataaacacactaaaagctcagacttcactcctaccccatatacccatgtaacaaaattgcacttgcaatccttaaatttatacagttttaaaaaatggttttagagttttggttctgtgattaattttataatgtttcattgtggtaaagcacatataataagctttgccattttaaacataaaagtcagaggcattaattacattcagaatgttgtgcaatcatcaaaactatgtatttccaaaaaaaattttcaccccaaactgaaactctgtactcattaagcaacaactcctcattctccctttcctcccaagtccctggtaggaataaattttatggcattttaattaatttaagtgtaaaaaactaaaagcagctggtggctatcatactggacctcacagttctaacaccatcagtatcaacccctggacagatataatcattcctaagctgcctttacatttattattattctatttatggtaatctgtaatctattctcccacaaagctggactattcctgtaagaacatatcttataccatttcattcccagctctgaatcctccagtggttacctatcacaattaacaaagaaatccaagctctttactatggtctgtgtttatctgctcctcagactgtgcattctcctttcctcctcccagtgcctgcagcctgactggactttgtagtgatctttgagctcatcaagtgctgtctgtattcagactctgcacagtgtctcttctctctgccctctagacattcgcttaacttactctgtcataccattctgacctgctcaagtgtcatcttctcaaaaagattgttccagagctccctatctaaagtagcagttgctgacaccatgaatgtgattaccctaccttgttttctttgtattattatactttttatttcgacagggccgcaatctgtcaccaaggctagggtgcagtggcacaatcatggatcactgcagcctcaaactctggggctcaagcagacctcctgtctcagcctaccaagtagctgggaccacaggtgagcaccaccacacttggctaatgtatttcttcatagcacttagtacatccatcactttagtgtgcaactgtttacgcatttatgttctatctctgtcactgtactgcaagctccataaagacagaccttctctctccagttcccataatactacccagcataaaataggctgtaagtaaacatttattgagtacataaaagaagaatcttattcatgtcaaggctgtaatctatgttagactcaaagagatagtctcctgactaaatggaagtgtttctttattgaagcatgcctttaaaaaaagtgttgcacatggtggataagcttttgtatgtgctgctggattcactttgccagtcttttattgaggattttcacatcaatgttcataagggatattagcctgaaattttctgtatttgttgagtctctgccaggttttggtatcaggatgatgctggcctcataaaatgagttagggaggagtccctcttttaccattgtttggaatagtttcagaaggaatggtaccagctcttctttatatctccagtataattcagctatgaatccatctggtccagggctttttttggttggtaggctattaattactgcttcaatttcagaacttgttatgggtctattcagggattctacttcttcctgattttgtcacgggagggggtatgtgccaggaatgtatccatattttctagattttcaagtttatttgcagagaggcatttatagtattctctgagggtaatttgtatttctgtgggatcaatagtgatacctcctttatcattcttttttttttttttgagatggagtctcactctgtcacccaagctggagtgcagtggtgtaatcttggctcactgcatcctccacctctggggttcaagcaattcttctgcctcagcctccccagtagctgggacagtaggcacaaaccaccacacacagcaaatttttgtatttttagtagagatggggtttcaccatattggccaggctggtctcgaactcctgacctcgtgatccacctgcctcggcctcccaaagtgctgggattacaggcatgagccactgcacccagccccctttattattttttattatgtctacttgattcttctctttttcctctgttagtctagctagtggtccatttattttattaatctcctggattcactgatatttcaaagggtttttcatgtctctatctctttcagttctactctgatcttagttattgcttgtcttctggtagcttctgaatttgtttactcttctctaggttttttaattgtgatattagggggtcaattttagatctttccagctttctgttgtgggcatttagtgctataaatttccctcttaacactacttcagctgtgtctcagagattctggtatgttgtctctttgttctcactggtttcaaacaactttgttatttctgccttaatttcgttacttacccagtagtcattcaggggcaggttgttcaatttccatgtaattgtgtggttttgagtgagtttcttaatcctgagttctaatttgtacatgtacaaattagagtacaccatggaatattatgcagccataaaaaagtatgagttcatgttctttgcagggacatggatgaaactagaagccatcattctcagcaaactaacacaggaacagaaaaccaaacagtgcatgttctcactcataaatgggagttgaataatgagaacacatggacacatgaaggggaacctcacacacagagacctgtcaggggttggaggggaagaggagggagagcattaggacaaatacctcatgcatgtggggcttaaaacttagattacaggttgatagatggagtgaaccaccacagcacatgtatacctatgtaacaaacctgtacattctgcacatgtatcccagaacttaaagtaaaatttttaaaacagatataaatattgtatacataaaaaagacacacaatgtttatgaatagaaagattttatattgtgaataagtaatttctactcattaaattatggttaaatgcaatcctactcaaaatcctatcaggtaatttgaaaattgacaagctaatttaaaatttttttgaaaatttaaaaggacaagaagaaccaagaaagttctgaagaagaacagagctcaagaatgtataccatcagatgtttccaactttattacaattaaaataagatgctattagcaggacatacaaatagagaaatcaaaaacaaactcatacttataccatcacctgatttatgacaaaggtgaaactgcagtgcagtgaggaaataataatcttctcaataaatggtgttagataatttggatatcaaaatgggggaataaaagaatttagcccttatcttacttcacaaacaaaagtcaatcgtaggtgggttataaagctcaatctgaaacgttaaaaattcaaaaagaaaagcttctgtaacatagaagaatacctttatgacaatggggtagacaaaaatttcttaagccagacaaaataagcattaactacacagaaatagtctgataacttgaactacattaaaattaagaaattggtattaacgaattcaccattaagagaaagaaaagacaaagtgggagaagatatctgcaatgtttatgtccaatcaaaaatttatgtccagaatatataaaaaatctcctacaaatcttcatatattctggataagaatttttgattggacataaaccaaaaaaagtccaggaccagacggattcacagccgaattctaccagaagtacaaagaggagctggtaccattccttctgaaactattccaatcaacagaaaaagagggaatcctccctaactcattttacaaggccagcatcatcctggtaccaaagcctggcagagacacaacaaaaaaaagagatttttagaccaatatccccgatgaacatcgatgcaaaaatcctcaataaaatactggcaaacagcatccagcagcacctcaaaaagcttatccacaatgatcaagtgggcttcatccctgggatccaaggctggttcaacatacgcaaatcaataaatgtaatccagcatataaacagaaccaatgataaaaaccacatgattatctcaatagatgcagaaaaggcctttgagaaaattcaacaacgcttcatgctaaaaacctcaataaattaggtattgatgggacgtatctcaaaataataagagctatttatgacaaacaacagccaatatcatactgaatgggcaaaaaccggaagcattccctttgaaatctggcacaagacagggatgccctctctcaccactcctattcaacatagtgttggaagttctggccaaggcaatcaggcaggagaaagaaataaaaattattcaattaggaaaagaggaagtcaaattgtccctgtttgaagatgacatgattgtatatttaaaaaaccccatcgtctcagcccaaaatcttcttaagctgataagcaacttcagcaaagtctcaggagaaaaaatcaatgtgtaaaaatcacaagcattcttatacaccaataacagacaaacagagagccaaatcatgagtgaactcccattcacaattgcttcaaagagaataaaatacctaggaatccaacttacaagggatgtgaaggacctcttcaaggagaactacaaaccactgctcaatgaaataaaacaggatacaaacaaatggaagaacattccatgctcatggataggaagaatcaatatcattaaaatggccatactgcccaaggtaatttatagattcaatgccatcgccatcaagctaccaatgacattcttcacagaattgggaaaaaactactttaaagttcatatggaaccaaaaaagagcccacatttccaagacaatcctaagccaaaagaacaaagctggaggcatcacgctacctgacttcaaactatactacaaggctacagtaaccgaaagagcatggtactggtaccaaaacagagatatagaccaatggaacagaacagagccctcagaaataataccacacatctacaaccatctgatctttgaaaaacctgacaacaacaagaaatggggaaaggattccctattcaataaatggtgctgggaaaactggctagccatatgtagaaagctgaaactgaatcactttcttacaccttatacaaaaattaattcaagatggattaaagacttaaatgttagacctaaaaccatacaaaccctagaagaaaacctaggcagtaccattcaggatataggcatgggtgaggacttcatgtctaaaataccaaaagcaatggcatcaaaagccaaaattaacaaatgggatctaattaaactaaggagcttctgcacagcaaaagaaactaccatcagagtgagcaggcaacctacagaatgggagatgatttttgcaatctactcatctgacaaaaggctaatatccagaatctacaaatgactcaaacaaatttacaagaaaaaaacaaacaaccccatcacaaagtgggtgaacaatatgaacagacacttttcaaaagaagacatttatgcagccaacagacacatgaaaaaatgctcatcatcactggtcatcagagaaatgcaaatcaaaaccacaatgagataccatctcacaccagttagaatggcagtcattaaaaagtcaggaaacaataggtgctggagaggatgtggagaaataggaacacttacactgttggtgggactgtaaactagttcaaccattgtggaagagagtgcagtgattcctcaaggatctagaactagaaataccatttgacccagccatcccattactgggtatatacccaaaggattacaaatcatgctgctataaaggcacatgcacatgtatgtttactggggcactattacacaatagcaaagacttggaaccaacaaaaatgtccatcaatgatagactggattaagaaaatgtggcacatatacacaatggaatgctatgcagccgtgaaaaatgatgagttcgtgtcatttgtagggacacagatgaatttggaaaccatcattctcagcaaactatcgcaagaataaaaaaccaaacactgtatgttctcactcataggtgggaattgaacaatgagaacacttggacacaggaaggggaacatcacacaccaggctctgttgtggggtgggggaagcggggagggatagcaataggagatatacctaatgtaaatgacgagttaatgggtgcagcacaccaacatggcctatgtatacatatgtaacaaacatgcacgttgtgcccatgtaccctagaacttaaagtataaaaaaattattaaaagtcattgaaatgtacactttaaaaaacacaaaaagagtttattctatcaggattctgactagagtgctctagagtatgacataggatagggaatgtcttaataagcttcaaaattctaggaataatgaaactaggaaacaaagctttgaaaaatgccaggaattcaactgcctccctggcctttccctgtcaatctatgtgccccagcagccaacttacatagcactgtgtgcaggcttgtaaatagaccttccagttctgctataatcaataccttattgtccataactcaatttggagaaggtttagctgtctaccaactcttgtggagagtttctgtgaagttttgttttgggttgcaagaatctggaaaacagatgcagatttttttgaggaagattttgaaatttctacttataaggtacccaaaatgggatccaaactcttgaatttggttgatcttctgaaatacatacctgtgttttaagatttgcttgagcaaacctttaaccatggaaattttaaccaatgatttccaggttgaaacaattccagttttgtcatttaaataccacagatgaatctgttttagcacagagtacaaatatcttttttccttttgagcatttggaatagtgtgttttggtaataaaacatagctctgcatattaatgaaacatagctctgcatattttgtatggggaaaattagcattctgtgaacaaagtcaataatttctggccttgcattagtttccctactataattaaaacttagttttggccgggtgcggtggctcccgtctgtaatcccagcactgtgggaggccaagcctggcggatcacggagccaggaggtcgagaccatactggctaacatggtgaaaccccgtctctactaaaaatacaaaaaaaaaaaaaattagtcaggtgtggtggcggtcgcctgtagtcccagctactcaggaggcaggagaatggcatgaacctgggaggcagagattgcagcgagccgagatcatgccactgcactctagcctgggtgacagagtgagactctcaaaaaaaacaaaaacaaaaaaacaaacaaaaaaagcacttagttttgaaagtatcttagtgttaaatttccagtgcttcaatattacaattaaaaccttgctttactgagagcagaaacataatgcagaaaagaaaaaagaccaacagtctctagattgctggatttatgtggatatgatggggttggtatttaacgatttctcccttgaatcatagcaaagatgcttttgtgaagcatagctctttcataaatatactttccagccattcagcattacctatctttaggtttcttttgctttgtgtttccactccaatatcatttctggaaaaaaattacagtaacaaatttattgagagctggcattgtgaatggtgcctaggacttaattcataaagagaaggtgaattctgctgaaaggtgcttaatacactgccccccaaatcaagagaaacaggccattctgggacacacatagcctgtctcacacaggggtcaggaagcagggatatcagggaattgggactatgtctttatgatagatatggttaggctttgtgtacccccatctcatcttgaattgtaatccccaggtgttaagggagacacctggtgggaagtgattggatcatggcgggtggtttcccccatgctgttcttgtgatactgagtaaattctcatgaattctgatggttttataaatggtagttttttctgcacacacacacatgttttttctcctgctgtcatgtaagaaggtccagtttgcttctcctttgccttttgccatgattataagtttcctgaggcctccccagctatgagtaactgtgagtcaatttaacctttttgctttataaattacccagtcttgggaagatttttattgcagtgtgagaatggactaatacagtaaattcatactggtagagttgggtactgctataaagatacccagcaatgtaaaagcgactttgggtctggagatggagatgagaaacctattgggaactagagcaaaggtcactcttgctatgcttaagcagagactggcagcattttccccctgcctaaagagctgtggaactttgaatttagatgatctgaaattgaaacttatatttaaaaacgaagcagagcataaaagtttggaaaaatatgcagcctgataatgctatagaaaagataaacccattatttggggaaaaattcaagccagctgcaaaaatttgcataagcgacaggaagcctaatgttaatcaccaagacaatagggaaaatgtctccagggcatgtcagagaccttcacagaagcctttcccatcacagaccaggaggcctaagaggaaaaaatggctttgtgtgtggggtccaggccttgctgctttgtgcagccttggtacttggtgccctgtgtcccagccactacatctgtggctaaaaggggccaaggtacagttcagaccattgcttctgtaggtacaagccccaagctttgttggcttccatgtggcattgagcctgtgagtgcacagaagtcaagaattggggtttggtaacctccacctagatttcagaagatgtaaggaaaagcctggatatacaggcagaagtttgctgcaggggtggagccctcatggagaacctctgttagggcagtgcagaaaagaaatgtgaggtcagagctttcacacacagtacccaatggggcactgcctagtggagctgtgagaagagagccactgttctccagatcccagaatggtagattaaccaacagcttgcactgtacatctggagaagctgcagacattcaatgccagcccattaaagcagcttggaatggggctgtaccctgcaaaggcacaggggcagaactgcccaagaccatgggagcctacttcttgcaccagtgtgacctgaatgtgagacacagggtcaaaggagattattttggagctttaaaattcaatgactaccctgctggattctggacttgcatggggcctttagcccttttgttttgtccagttctcctatttggaataggagcatcctcatccaatgcctgtaccctcattgtatcttagaagtaattaacttgcttatgattttataggccatgctaatcagcattcagttccagattccaatttattctcagtgtgcctgtataaattttctttccatatatatagaattaaatttctattacttatttgaatgttatagaatactgttcatatatttaaaataaaaccaccaggtataatgatttctggcttagtataaaaaatattttacccagttagtgttatttacacaggtggatgtggctccacaacatttagacaagaagaataaattcagctgtcgtatgttgccgtgactcagcctctgaagaaattatgaaaaaatccaaatttcagcaaaattatatagttgttttcagtacctctgagggtggtatatcaagaattctcgtgctactgtttgagaaaacagattccgttgttacctagaaaatcaactgcatggcatttttataaccttaccccatgtaaaaaacatatattgaaatgtactaataaatgcagactacattacttgaaaaatggtaatacagaatgccacttttaatagttgaggatatgaatttttggtagaaataatgtaaaataaagcttctggtaagccttgggtagttagatttacatcagtgtaaagtaggatgaaaatctgtaaaaaataaaaacaaagaaacaaaaacctacaccaacaaaaccctaacatccaccaatgcatacatattgatctttgtgctgggaaaatctaaagcagaacattttggttaacttgatagttatttattttgactatattggcatgttgctaaaactgcttatatttaatttgagtgaaacatgtccacattattaaaagggttgttttttactatgaatgatggatgtaaagtcttgatcctcacccagataaatatggcaacactttcttctgcttctttcgaactgagacattatgaaagctcaaatttgaagtgagagggacttaacatcagagcctgaaaaaccaagaggaatgaggtaggatggtcagctctgaagctcagggtggcctagggaaactcaatataatgatgtcaactatgaagcttactaggtaaaactacaaataggctgatctcatttcacagaggtaagcccacactcccctttccaaaaaagtaaaaaacaaaacaagcaaataaaactaaaaatacaaacttgaaaacaccatggcttaaatttggtgggaagaagcctgtgggacaaaaaatagtggtgccaaaagaattgagccagctgggtgtggtggctcatgcctgtagtcccaggagtttgggaggccgaggtgggcagatcacctgagatcaggagttcaagaacagcctggccaatatagtgaagccccatctctactaaaaatacaaaaaattatccaggcatggtggcaggtgctgtaatcccagctacttgggaggctgagacaggagaatagtttcaacccaagaggtgaaggttgaagagagccgaggtcatgccattgcactcaagcctgggcaacaagagagaaactccatcaattaaaaaaaaaaaaagaattgagccagaataaaatgtatttaagggttattaatgggaatgtttctagcacataagtatttgttccacttcttattatattatattagtaatatcctttcatgtaatatcagcttctccaagatagggatgtcaaagacaaactaagacaagtgcctaatatgtcataggcattttgttatcaaatttaacaaacttgtaatgattatataaattttactgaattgtgttttatgtataagcctcacctaaaggcattatccagtacatacaaccttgagtgttttctgggattttctgttgcctgatttcaaatcaaccttattgaaattctagcaatttctccagtcccagatgtaaaaataaaaaagcagaaataaagccaaattacccccaaaaggatacacattatgcatatagaacaaatgaacccaaaaccacataaggtaaacaacaaatctactggtccaaaattcagcctaacttcaacagtaccaggcaaaaaccatttgtagaaattaccaaagtcaatatagaaacccttagtctattatgccaataaatatgggggaacctgccccgatagtcaagtaggttgttttctattttccctaagtgtctgccagtttgagaaataaagggagagagtacaaaagagagaaattttaaagctgggcatccaggggagacatcacatgtcagtaggttccatgatgccccccaagacacaaaaccagcaagtttttattagggactttcaaaaggggagggagtgtacgaatagggtgtgggtcacaaagatcacgtacttcacaaggtaatagaatatcataaggcaaacggaaacagggcaagatcacaggaccacaggaccggggcaaaattaaaattgctaatgtagtttcaggcaccattgttattgataacatcttatcaggagacagggtttgagagcaaccagtctgacaaaaatttattaggcaggaatttcctcttcctaataagcctgggagcactacgggagactggggtttatttcatccctacagttttgaccacagaagatggccacacccaaggaggacatttataggcccaccctcaggggtgcattctctttctcagggatgttccttgctgagaaaaagaattcagtgatatttctcccatttgcttttgaaagaagagaaatatggctctgttccacccagctcaccagtggtcagaatttaaggttatctctcttattccctaaacaactgctgttatcctgttcttttttcaaggtgcccagatttcatattgttcaaacacacatgctttacaatctgtgcagttaatgcaattatcatagggtcctgaggtggcatacatcctcctcagctgacaggattaagagattaaagtaaagacaggcataggaaatcacaagggtattgattggggaattgataagtgtccaagaaatcttcacaatttgtgtttagagattgcagtaaagacaggcataggaaattataaaagtattaatttggggaactaatacatgtccatgaaatcttcacaatccacattcttctgccgtggcttcagtcagtccctccatttgggtactgtgacatcctgcaacaaataaaaaattaccatttaaaaatacattaaatataacagaacgtatacaattacaataaaatatttttaaatgataatcttattttcaaatatttaccacatttagacaagacttttaatgaaaaatacttatagctacaatgtatgaattaaaatagccctggaagaaatagtaattctatacataataaagattaaggcagggtgcagtggctcacacctattatcccagcactttgggaggccaaggtgggcagatcacctgaggtccggagttcactaccagcctggccaagatggtgaaaccccatctctactaaaaatgcaaaacttagccaggcctggtggcaagcctctgtaatcccagccacttgggaggctgaggcaggagaattgcttgaacctgggaggtggaggttgcagtgagctgagattgcaccattgcattccagcctgggtgacaagagtgagaatccatctaaaaaaaaagtaaagcttcaagcttgtggaataatttatcctggacacacaactaatgtcccaaattaagctgagatgtgtttgattttaaaattctgctttttccactgtggacaatggtgatgtaacagttaaatcttggtctcagagttggtggttgggaataaatcaaggcaagcacttttatgctttgttttatattctttatcaccaacattttcttctctaatatgtcagtatttacatttggaccacagctgacttttactgaagtctactataaaacatggctaaattgaaaattaatgtgatcataaaatgatttgtcatgaaagcaggtatatttttctttttttttcttttattattatactttaagttttagggtacatgtgcacattgtgcaggttagttacatatgtatacatgtgccatgctggtgcgctgcacccactaacttgtcatctagcattaggtatatctcccaatgatatccctcccccctccccccaccccacaacagtccccagagtgtgatgttccccttcctgtgtccatgtgatctcattgttcaattcccacctatgagtgagaatatgcggtgtttggttttttgttcttgcgatagtttaccgagaatgatgatttccaatttcatccatgtccctacaaaggacatggataccaaaacagagatatagatcaatggaacagaacagagccctcagaaataatgccgcatatctacaactatctgatctttgacaaacctgacaaaaacaagcaatggggaaaggattccctatttaataaatggtgctgggaaaattggctagccatatgtagaaagctgaaactggatcccttccttacaccttatacaaaaatcaattcaagatggattaaagacttaaatgttagacctaaaaccataaaaaccctagaagaaaacctaggcattgccattcaggacataggcatgggcaaggacttcatgtctaaaacaccgaaagcaatggcaacaaaagacaaaattgacaaatgggatctaattaaactaaagagcttctgcacagcaaaagaaactaccatcagagtgaaagcaggtatatttttcaagtttcagctcagtcacaaatttgtatctatttgaattttttgaaaatttctgacatatactgaagtaaatatcaaatgtattgttttattcaattgtttggattcaattaaaaaataatttatattcaagtttgttgttatatttacttttgaccaaatttgactttccaaacaagaaaagctaaagcatttttttcaaaggttcaagggacttaagcttactggcatcaaatgttctgtagtaaaacaaacaggcaaataaaacctaatatttttatcaataataatttaatagttttatgtctgagaacttaagaatcaacgacatcaactccagatgatgtcaattgcataattacactggtaagatagaaactgattatcagagtctaacaaatgatggatatggcaacctaacacttgacaaaaccattcaggatgtgttagaaaaacaagaaggtactactaatgtaaagctttttctttctctaactttacttttttttttttttttttttttttgagatggagtctcactctgttgcccaggctggagtgcagtggtgcaatctcggctcgctgcaagctccgcctcccgggttcacgccattctcctgcctcaacctccctagtagctgggactgcaggcacccaccatgacgcctggctaattttttgtattttttagtacagaccggctttcactgtgttagccaggatggtctcgatctcctgaccttgtgatccacctgcctcagcctcccaaagtgctgggattacaggcctgagccaccgagcctggcccaactttactctttattctcaaccttacaaccatcagatactcctgtacacagaataagaaaaatcaactatttttccttgaaggcaatgtttcatcttttatgttataatatctgttccacatttctgtgaaaatgctgttgaagtgcaccttccttccttcaccagagattgcctgtgtgaatttgaatagatggtcactggaggggaccagcttggcacactgggttgaattgtctctttgcttttcagacaaagtggctttgaaaagactgaaagtaaagtgactgctgattaagcagatggcttgccatgtcaataggacaattgtttgaaaatcacatcgcatgaactataactattaaaatgagaaatgcatgatgcaaatattgcacaaaaaaatagaatgaaaatgatgaatacagccaaaaaagacagccaaactcaattttagcaataaagtaaaatataatctactgtcaggggaaggtaacttgaagtacttgagatgttctttaatttaaaaatccaaaaatatttttagctttagttgtgataaaacatgtttaagcattttctatttgaaataaaactttaatttcatgctttgtcggtttagtttccctaaataaatagaaaatagtaaaatatcacatactaaaaaaatcaacttctttggtaataaataagtgcaactgtcagaccaaaacatagttacattttacccaatgtcatgctgaccaattcgatcaaacgccacttccttataactaagagagatgcaaagatgtagactttatgttgagtgagacaggtaaggattactaggaggtagataattgttttactaatcaaggtcgattttcattactattttgtctctatgttaattaatggtcttgattcaagaaaatttttttaaaaactcatcttttcagtcaggcaaaatattaacaaaaaggcatagaaatgaaggcatttaacacagtcatagtttacattttaaaattaaaatacttctagaaataacaaagaaagaaaaaagacacatataaaaacaaacgaacttaatttttggtgcaaagcactcattactaagcctaacacaaatattttggtgaaggctttctaacactgacattcttctcatgacttaaaagagccactaattttacttttgacatatatttagttttaatgttaaaagctaaaaggagcctattattttatttataatttgtggtctgcatgtacatcatcatccattgagtcgactaaagtttctgaaagtttcagaaacagtaacataagaatactttttccggccatgcatgttgtctcacgcctgtaatcccagcactttgggaggccgaggtggggggatcacctgaagtcaggcatttgagaccagcctgatgaacctggtgaaaccccatctctactaaaaatacaaaattagctgggcgtggtggcacatgcctgtaaccccagctactcctttaatgaccacatgtgaagtttcttttgaactaattttaactacctatttttattgcttttttgctcctattagaaaaaatattaaagtttctgttactacaatctattcaaatctaaacatagtgcttatcttaaaagatctgtatgcttggaattatggaaatcctattctccatttaaaatactgcttttcagtaagccaaatggggcaattgtggctcacaatcataagttattaaatattaataccatcatctagatggaacttttagttatctgcatgttcaaattgttttaacttgtaataagtcagaaacaataaatttttataaactataaaaataaactaaaactatatttatcaatgcattttttttggttttagaatacttagccccaggattatttctagttgacataacactagatttcagatgatgtggatgtagaaactagagacgtcctggttgactctgcttcactttctgccttcatttagcacacaagcatatcggcacaatgaaagccagcaatgctaacccttttgaaaaacacaccagtgcccttctacagagaatatatgtgtgaaaagattcatctgaaagtcatgccatcttctttttgatttacagacttatatatgacaaataacacaaataaaaatttaacactgccatataatcagaaaattattctaaaaattccttctgacacattattctttgtcaccaaaatggttgtgatgaaataattgcctttgcaggactgttgtcttaaataaccaatactcctgtttcattgttcttgaactttaaccataatagaaattttatttcctaattatgtcacttaggtgtgattatcatagcttcatattttcaaaaatggttctaaaaaaactaaaccactgaccatctttgtttcccaaagagtaataagttaacactatcatctagcatactgtaaatagatgaaaaataaaaatgtagagcaggggtgtccaatcttctggcttccctgggacacactagaagaattgtcttgagccatacataaaatacaccaatgatgataaaaaaatcacaaaaaactcataatgcttttagaaagtttatgaacttgtttagggctgtgctgaaagccatactgggccacgtgaagcctgtaggccgtgagttggacaagcttgatggacagtcatttattttagctgcacacccaagactaaggccaagagctttcagagaaagtagcttataggatgtcaggagacctgttatagaaacattcacccctatgtctaaaggggacaaaattctatgtcttccacccttaattccaaccattaaacaaaactggagaaatctaacatggcattatatcacaaagtattttattatttttattttggattcaaggatacacgtgcagatttgtaacataggtatactgcatgacattgaggtttgggcaattaataatcccattgcccaaatagggtacattatacatcacaagtacttttaaacccctgtaccccttctccctccattttggaatccttagtgtttattgttctcatctttgcttccatgtgtacccaatgtttagcttccacttataagtgagaaaatgtagtatttggttttctgttctgtgttaatttgcttaggatcatgaccttgagctgtatccatgttgctgcaaagagtattacatgattcttcttcagtggctgcatagtattggatggtgtgtaattacataatttttaaaatccatcttaaaatttatgagcacatggtttcattccatgtctttgctattgtgactagtgctgcaataagcatacgagtgcaggtgtaatttatttgtatttgggtatacgcccagtagtgaggctgctgggtcaaatggtaactttggttttagtcctttgagaaacccccaaaatacattctacaaaagctgaactaatttgcattcccactaagattatatcagggttctcttttctacacaattttaacatctgttttttttttttttttactttttcataatagccatttagactggggtgagatggtatcacattgtggtttggatttacatctctctaatcattagaaatgttcatcaatttttcatgtttgttggctgctttttttgtctttcttttaaaagtataggttcacattttttgtcaacattttttcttaaattccttataaaacatatatattagttatttattgtatgcagtttacacatattttagcccatactataggttgtctgtttattttgttaatagtttctcttgctgtgcaggtcacaatttttaatttttatttttgttgctttcacttttgaggatgtagtcattaattctttacagagaccaatgccaaggagagaattttctaggtgttcttctaggatttttataggttgaactcttacagataagtctttaatgtatcttgagttaattttctatatcatgagaagtagtggtcgagttttcctcttctgcatatgactaaacagtttttccagcaccttttattgggtagggagttctttccatttgtttctgttgatgctgtcaaaaatcaattaattgcaagagttcagcttcatttcagggctctctcttctattcagtaggggtgtgtgtgtgtgtgtgtgtgtatctgcatccatattatattggttaccgtagcttgtggtaaagtttgaagtttggtaacataatgtctccaggtttattctttttgtttagtatagccttggacatttgagcttttttgttttcatataaattttagaatagtttttttgtctaattttataaaaaatggcattggtagattgatagaaatagaaataaactgtcgattgctttgggcagtatgaagtttttaataattctaatccattatcatgaaatactattccatttatttgcactgtgtctgatttctttcagtagtggtttgtagttcttctagtagagatatttaacctcctttgtttaatggattactattttattttttgtttctggctattgtaaactggattgtgttcttaattttgctctgcttaagtgttactggtgtatagaaatgttcctcatttttgaatgttgttttgctttttgttgttgttgctgagattttgatgaagtcttttattaggcttaggagtcttttggaggagtctttgaagtaggtagaaaattatatcatcagtaaagacagataagctgatttcctcttttgttatttgagtgctttttctttctttatcttgcctgattgttctggctaaaactttcagaactgtgttgaataggagtggtgaaagtgcacattcttttcttatttcaatttttaggaaggatgcattaatctttcacctgttcagtatggtgttggctgaggatttgtcctatatggctgtaattattttgaggtatgttccttcaatgcctagttttttgagaatttttttcaaaaatagatattacattttattaattgctatttccacatctattgaggtaatgtggttttgtttgttaattatttttatatgctgaatcacatttatagattgcacatgttaaaacattcctgcattcacagaataatgtccacatagttgcagtgaaataactttgatttcctgactcagtttgcaagcatttcatgaataatgtttgtgtctgtattcatcagggatattggcctgtaattttttttggttgtgtctttacctgattaatatatcaagatgagactgatattatatgatagaattaattaggaaggagtcccactttgattttttggaatactttctgtagaattacagccaactcatttttgtatacatgataaaatcatgctgtgaatgcatctggtttagcactttttataattggtagtttttttttatcaccaattcaatttgcttgcacatttttggtttcttcaagacttctgtttattcctgattcaatcttgggaggttgtatatttctaagagtttattcatttcctctagactttctagttggtgtgcacagagatatttatagtagtctgcaagtatcctttgtatttttgtgggattggttgtcacaaatgtaacatttaaatagatgcataatgaaagtgtaacaatatctcctcataataaatctctttaaccagttataaaataaatgcaattcaagttaatgtcatatgtaacaacaatgcacacctaacatactaaataaggaaaaactaagccttttctctaagagctagaacaagacaaggatgtccaatttctccaatccattttttttttttttgagatggagtctcactctgttgcctaggctggagtgcagtcgtgcaattttggctcactgcaagctctgcctcccaggtttacaccattctcctccctcagcctcctgagtagctgggacttcacgtgcctgccaccacgcctggctaatttttgtatttttagtagagacggggtttcaccttgttagccaggatggtcttggtctcctgacctcgtgatgcatccacctctgcctcccgcagtgctgggattacaggtgtgagccaccatgcccagcccaatttctttgatcttactgaacataatacaaaatgaccaagacagaaaaattattcaataaaatcaaagcaatcttaaataaaatgaagaagataaattatattttccttgcagatgatataatcttaagcatagaaaaacctaggacttcacaaaaaattattagaataaacaaatttattaaacttgcaggatacaaaatcaacataaaaaattcagtaacatttctatatactaacaataaagtatctgaaaataaaaccaaaaaacaatcccatctacaataattgcagcagtaactatgcttagaagtgaatgtaaccaaaagggtgaaagatctgtacattataatcttaaaaaaaagttagaaaataatattccaacaaaaagatattctaattcataaatgggcatgattaatattgttaaatatctgcattacacaaactgatatacagatataataaaacttctattaaaataccagttaaattctccacagaaaattttttaaaaatctaaaatgtatattgtcccacaaaaggccttaatagctaagaaaatcaagcaaaaaatgaaaaataaaaggctgaaggaatcactctacctgacttttaaatgtccaacaagctacagtaatcaaaacagagtgttacttacataaaaatggacacaaaggccaacagagcaaaagagaaagaccagaaataaattcatgtatttacagacaactgattgtaaataaagatgacaatttttttaaaaaaagagcagtctgttttataaatgatattgagaaaatatatatccacatgcaaaataataaaatcagaccttcatctcacaccatatataaaaattaactcaaattagatacttaaatatgagacctgaaaatctaaaactaagatgaggacatatagaatgaatgccccataacattggtctgggcagtgactcttgggtttaacctcaaaattttaggggaacatagacaaatcagattccttaaaattaagaagctgctgcacaccaacagatacaatcagcagaatgacataactgaaaaatggaagaaaatatttgcaaattacacatgtgaaaagcagttaatatcaaaaatatacaagaaactcaaaggactatacaacaaaaaacaaataaccatgaaaaataagcaaaagatctatataaataattttcaaagaaagacatacatatagcttggcagacagatgaatatggctcaaagtcaattatcatcaaggaaaggcaaaccaaaacaactctaacatataaactcactcctgttaaaatgtttaaaaaattgttggtaaacttgaaaaaagagaaagaggggagctttcacactgtttgtgtcaatgtaaataaaaacagccattatgaaaaatagaaattttgcaaaacaaactctaacatgtaattgaactactggatatctatcacaaaacaaatgaaactagattgatgaacagacatctgcaattgtgtttgttgcagcacactttgcagaagccaaaacatagaatcaacatatgtgtccatcatccaatgatgaaatacagacactatggtatatatatacaatcgaatactgtattttcaacagaaaatcttatttttaatcacaaagataaacctaaaggacactatagttgttgaaataaggcacagaaaagttaatatctcatgatttcactcacatgtggattctacaaaacatatcttgattacataattacagttgaataagaaaaataagttcaagagattataatgcatgtattgtatttctgaaaaaatactgacagtaaatattgtcttctcaccacaaaaataataactatgtgaggcaaagcatttgacaattagctaaaattaggcattgacaatgtatatttacttcaaaatactatttcacaaaataaatacatatttcatctgtgaatttaaaaatatatttataaaaactattaaaaatgacaatgtttcaaattctgaccggtgtttttgtcataaacctgtctgaatagtatgaaagatacataatttctgtgctgttttgtcacctagtcagtcatgaccatatgaactctaatatttaccaccatgttcggcacccagcacagagcatgggagaagccaatgtaccttagggcttttattttgagcttgggacaactggagtttctggtgctggtggtaatgatagggaagacacaaaaagggcagctcttgctgtgtttcacatgattaaaccactctgaagagagtaaataagtttgcatcccagatcactgaagaaattttttaattcaaaagatgccatgatctttaaaatttttccagataaaatgaccaaggagttgactagttaggtgacaaagactgaaacctctaaagtgtaaactgcacccaataaaaaagtacattatacaagtgtgagaaattcctcaagattttaacattaatatgaaaaagattatttcacatgtgaaatccacaggtgtcattctattatttttgaatatttaacattcacaccaaaaaaaagattctgaatgaaaacttaagttgagctgtaagtatgtaataaaaaattaagtttaacattctccacttaccattaactcttctaaaagtttaatttctaagacatatcttctaactaattttatattttccacacattgtgttaattttttttttttttgagatgaagtctcgctctgtcatcaggctggaatgcagttgtgcaatctcagctcactgcaacctctgcctcctgggttcaagtgattctcctgcctcagcctcctgaatggctaggtcaacaggtgcatgccaccatgcccagctaatttttgtatttttagtagagatggggtttcaccatatgggccaggaaggtctcaacttcttgacctagtgattctcccacctcagcctcccaaagtgctgggattataggtgtgagccaccacacacagactgtgttaaaatttaataaaagtttggttttacaaagataataaattctgactgatttattcctctcacctgtgaacactgcatgccttttatctcaattaacagatctgaaatttacattgacaaactttcatcagaacctacaaagtactgtgtgaagtgacatggcacaaaacaaacagcaataaagatgtaaccataacacaaagaataaaaagaagggctgtgatgcatacacagttgggataaacataagtagacacacaaacaaaactaaagataatcagaaaataagcagaatgtctctttaaattcagaaagagtcaattttgcagcataagaacaatgtcctctccatatacagaatcgattttatttcttcaccatgtgtatttccttatctttacttggagctacaaactaactccagcagaaatatttgtggccaataatggtgcatctattacacagcaagcattgtgtttgctacatttacatatcaaaatatctttatgacttatgaagcctccccagcatttacctaaacaaattggctgaatgaataaattcacgtatgtcaattataaagagtaaaaggaacaataataaaggaaacttagcttacacaggtttctccaattaaaataacaaaatggggtgttctaactaaatgaaatataagttggtaggatgcagtggctcatgcctgtaatcccagcaccttgggaggccaaggcgggtggaccaccaggtcaggagttcaaggccactctggccattatagtgaaacacagtctgtactgaaaatacaaaaactttagctgggcatggtggcacatgcctgtagtcccagctacttaggagggtgaggcaagagaattgcttgagcccagcaggtgggggttgtagtgagctgagatcccaccactgcactctagcctgggtgacagagtgagacaccatctcaaaaaaaaaaaaagaaaagaaaaaagaaagcaacaaaagaaatataagttaatacactcattgtgaaataacattgaaaaattattttgcatgcattagtaaattttacaaaaattcttagaatacctgagcaactcacataatgaatacttaataaattataaacacaaaaaatatgaaaaaaaatatcagtctaccatgagtaccaggcacatgaaagaaagaatttgcatggaaagattcggaaacgcaatccataagacttcacagtaattaattaaataaaatacagagaatacagatattattcaaaatcacggaggtttctggtcttctagtaaatgatttgtccactttattaaagtgatattttgttccaatatttcttgtcttctgaaaataggtacactcacactcacacaattacttgccccacaaatttcttacacctaatgtttatattaagagtaaaatatttgtatatttaacaccatgtaagtaaaaaactaacagtctgtatgagtttacgggcagagaggccacttgttcaacatatatatgaacaatttttaaaaatattcattcaggacttagaaatgtgggatttcttattatactactatgtaattattattatgaccataaaaaacctctgtagcaagtaataatttacttgtacatttttaaataactaaaaatgtttaattggattgtctgtaacacaaaaaataaatgcattatgtaatgaatacctcatttactctgatgtgattacaagttgtatgcctgtatgaaaatattctatatatgccataaataggtaaacaatactatgttcctacaaaaatttaaaacgttaaacaaatgtacatttttacccattgaaacaatactcttaaacttttcagtttaatgccacaggcaaaagagattgctagagagctcattctactatgttaccatttttatctacatctttaataaggtgggacacgttaaagttggtgacataacacttaactaaatgcaggtcttaaaaagtttaaaactattccctttaatttaaaagctaagttatcacagtcttataaaagaattttaaaattccctacattttattacataaaagtacaattggtaaaacaatttactactaaaactcaaagttttcctttcactataatgcagaatattactctaaacacataactcatgtatcacatgaaaaatgttaaaagtcagccataaagagcctctccaattagattttcaatatacatcttacattttaatatccttactcttccacggaaaagttaatgaatgatgcctacctaataagaaaggaatctctcagatttctgatgcaacagaaattgatgacatgcttttacacaaacaacaggaaaaaaggagcagaatgaagcagttttacagttgaattacctcactatttgcttttcaaaaaatctacatttttttcaaggaaaaacgtatatcttgaatgtaattataactctccaaaaaataatcttccactcctcttaaacttatatacaaataaattatccaacagttttagctttggattactttctatacagaacattctgatttagtgtaacgtcttaagtgccagtgccttaattcttcctattgtgaattttctaaagtttacaaagacttaattttgactaaatatttttacacatgtattccatctgcaaaaatatcttttattataaactgcatggtgttttttaagctgtagtttctgaacaaatgtttttccacatttattacatttgtatggtttccttcaacataaattctctgacgctgaacaagtttgagtaattcctttagagttttcttctagcataaaatctgtacattatatagggcaagtaaaggtattacaaccctctttatatttgtaatgtttgtctccagagtactcttttttaagggtttaaattttccaaggtctttcaaaagtaattacatttataataattttattaagtatgaacttcctgatgttgactatgatgtgagcaaatagaagtggcttttccacactctgtacaatttttcaagtataaacgcctttatgtgccataaggtatgagcatgttagaagttttgacacattctttgtttgtagagattttctccactatcaattattttacctacagtaagatgtgacaaccatttaaaggccttgccacattgttcagttttctaaggtttctgactgatatttctccaatgcttaggaaagtttgaggtgtattcataagctttgctaaacttttttaggttcataggcataatctttagtatgaattatggctggatatatttgagcaatacttaaaagattttgccacagtcttccgatttgtatgatttttttccagtatgaattctcataagtttagtaaggctaaaggactggttaaaggctttcccacattctttacatttgtgggatttctcttcagtatgaactctcttatatcgagtaaacttgagcaacaagaaaaagttttgccacattcttgacatttgtagggtatctctccagtatgaactctcttatgtttagtaaagcttaaggactggtaaaaggctttgcaacattcttcacatttctggattcctctccagtatgaattctcttatgtatagtgaggcctgaagactgcttaaaaagctttgccacatgcttcacatttgtagggtttctctccagtatgatttctcttatgttcattcagttttgaggagtgtttaaagactctgacacattcttcacatttatagggtttctcttcagtacgaattctctgatgtatagtaagctcagaggaccacttaaaagctttgccacattcttcacatttgtacagtttctcttcagtatgaactatcatatgcttagtaaggcttgaggaacagtaaaagcctttgccacattcttcacatttgtaggattcctctccactatgagttatctaatgttcattcagttttgaggatagtttaaagactttgccacattcttcatatctgtagggtttctctccactatgaattatcttatgtacattaaggtctaaagacttcttaaaagctttgccacattcttgacatttgtagtgtttctcttcagcatgaactatgttattttgaataaggtttgaggaacagtaaaacgctttgccacatttttcacaattgtatggtttctctccagcatgaattttcttatatatagtaagatttgaagacccttaaaagctttgatgcattcttgacaactgtagtgcttctctccagtatgaactatcatgtttagtaaagcttaaggaccagtaaaaggctttaccacattcttcacatttgtagggtttctcttcagtatgaattctcttttgaatagtaagccccaaagactgcttacaagctttgccacattcttcacatttgcagggtttctctcccgtatgaattctcttgtgtatagtaaggtttgaagaccacttaaaagctttgccacattcttgatatttgtagggtttctctcccctatgaattatcatatgtttagtaaagcttaaaacccaataaaaggctttatcacattcttcgaatttgtaagggttctctccagtatgaattctcttatgtagagtaaggcctgaagggtgcttaaaagctttgccacattcttcacatttgtagaatttctctccagtatgagctctcatatgttcattcagttttgaagattgcttaaaggctttgccacattcttcacatttgtagggtttctctccactatgaattctctgatgtatagtaaggttcgaagaccacttaaaaattttgccacaatctttacatttgtagggtttgtctccagtatgaactatgttatgttgagtaaggcctgaggaatagtaaaaagctttgccacattcttcacatttatagggtttctctcaagtatgaattcttttatgttctttcagttttgaggattttctaaaggctttgccacattcatcacatttgtagggtttctctcccatatgaataatcttatgtatagtcaggtttgaagactacttcaaagctttgccactttcttcacacttgtaggttgtatctccagtataaattttcttatgtttattcagtcttgaagattgtttaaaggatttgtcacattcttcacacttgtagggtctctctttagtatgaattctctcaggtatagtaagacctgaagactgcttaaaatctttgccatattcttcacattagtagggtttctcttcagtatgaattatctgatgttgtcttaggtgtgagaacctgtgaaagaattggccacattctttacatttgaaaggtttctctccagtatgtcttctcctaagtctatttgaatttgaaaatttccttaagactttcacacatgtattacattgaagtattttgctctgagtaatcgacaaacattggttaagtccattgtaacctccttcctgcaccttagatgcattcaaacttttacagccttttcttatttgtaaattctcatgtctgcatttcccatatcttctcagcatcactttttgaaatgaattttttgtgttctgatctagccaaaggtcttcggtgaaatgaaaacacagctgaaagaaataaaaataacaaattatctcactaggcccatgtaaatatacaaatctattgtttacaaatctaatacataaaattatacaaagtacattagcaacatggcataacaaaaataccacaggtcttaattattttatagacttataacaaaactgtactgaccaaaatgtctatggaaaatctagaaatgagttaagtgtgttcagtgtaccaggtgagcaaaatgccacaagccatactgaatggatagaaaagtttgttacatttgcccaacacctttactcctccataatgcagcatggcacttttagaagtaaactgcaatgcctggcatcttcctcaatatagaaaaagaaaaaactggctcgtgtagttttacttctggcttctgggcacttttacagagacttgtttctgtctccagtgacaaaatgtgctgaaagaaatgatggtatactttgaaataacagcttgagtctgctgagatcaaaggtaaatgttacagcaacaaactacagtaccacaggcatgcaatatgtgtaggaagtaattacagactgttaagaaacacagacaaacctctttaactgaataatcaacacaaaattccacacaagacacatcataacatatttgataggctcccagaatctctagttgagacaactggtttcagattatgttaggacaacaccacattataaagattgtgagaggtagctgtttgttaatgtccaaatctcaaccaaagagtacaatacatacaaaatattacagtgacatggcctaagtaaaaaaaaaaacttaaaactgtcagaaaacaaccatgaaaataaagatgtacacattaattttaaaaatttaacctaaatgggaacacaggtaactaaataaaatcagaaaaaaatagaatatcaaggaaaagatgaaaaatataatagaaattatggaagtagaaaatagaaatagaaataataactgaggccaggtgtagtggctcatgtctgtagtcccagcactttggagtttgaggcaggcagatcacttgaacctagggagttcaggtttaaactgggaaacatggcaatacttctcctctataaaaattaaaattagtcaggtgtattggcacacacctgtggtcccagtaaacaggaggctgaggtaggaggatcacataagcctagggaacccaaggctgcagtaagctgcaatatgccactgtactcaaacctgggtgacagagcaagacactgtctcgaaaaattaagaatacctgagaaattctcaaaagtaagaaaataaggttgtaaaaatgaagaagctcaacatactaaaactaggaaacacacagatccataacaagacatgcaaagcaaagttcccaaagtcacagacaagaagagaatctcaaatgctggaaaatacataattatggttccatgatataaccagtgactctttcaacaaaaaccttgcaggccagaaggaaattgtgtgctatagtcgagatgccaagcgaaaaatagcttctatgtaagaataatataaccagcaaaactgtgctacaaaaatgaagaaaaaggaaagacctctaaagataatgaaatgtggaaaaattatatcaacactacatgtgccctacaaaaaatgctgagaagagtcctcctactaaaactatatgatgctaaaaaacaaaactatcatataaaaataggtagctttctaggaaagatataaagatatgcaaatattatagaaaaaatatcctgtagcattattataataccaaaaaatgttttatttaattattctctaaaatttaaagataaaagctaaaaataataatgaacatctgttaataaatatataacataaatagatatgtttagtgacatcaataactaagctgaagacagatataataagaaataatttgtgcatggacccaaatttaaatttcaccacttcaaaatatattgttgaaattttaagaggtttttatataatcctgaaggcacccacaaagaaaatgtctgtataggtacaaaaaaggaaataagaaagaagtgacagcctatccatacaaaaatcaaaaagacacaaaggaagatagaatgagaaacagacctacaagaatcattaaacaataaaataacaataatctttgtcttcagaaaataaatattttaaaaatagacttgccaatcaatacacatacattgaatagtgggattatataaaattttatataccaagatccaacttgcctttcttcaagagtcacttgagatctagtagtgacatcagcctgaaagtggcaagtggaagaagacattttaggcaaacattaaccaaatgagagcagaagagatcaaaattgtattatacaaaatatatcgtaagtcaacaactctcttattttataaaatatactctatgtcaaaattcacaagagaaaaaaggtcattaaacaataataaagatataatttattgaaaatgtatgacaaatatgtgcatacatatatttatatgtttgtgtgtgtatgtgtatttctcacattaggtttccaaaaatacgaaacaaaaattgacagaattaaagcaacaaataaagagcaatataattataataagatattttaatacttcaatttctgcaatgaacaataaaacaaaacaatattaataatggaaaagagggccaggtacggtggctcacgcctgtaatcccagcaatttgggaggccaaggcaggcgatcacggggtcaggagatggagaccatcctggctaacacgatgaaacccagtctctactaaaaatacaaaaaattagtagggcgtggtggcaggtgcctgtaatcccaggcactcaggaggctgaggcaggagaatggcatgaacccaggaggtggagcttgcagtgagacaagatcgcaccactgtactccagcctgggtgagagcaagactctgtctcaagaaaacaaaaaaaggaaaagagaaactgaaagcagtacagatgggaacaagtggctcatgcttgtaattccagcactttgggaggccaagaaagacagattacttgaggtaaggagtttgagaccagcctggccaacatggcaaaaccccatctctactaaaaatagccaggtgcggtaggaggcgcctataatcccagctactcaggaggctaaggcaggagaattgcttgaaccagggaggcggggtttgcagtgagtcgagattgcggcactgcaatccagcctcggtgactgagcaagactccatctcaaaaagaaaaaatatacaaagaaagaagtataaaacaatattatgccctaacaaagaataccccttaacaatagcagggtataaccattctcaatagctcacatatattctctttgataaactgcctgttaggccatgataaaaataaaaacttactaaatctttaaaaattgaaattgatagattactttttatgaccaaaatggaataagagtagaaatcaacaaaaacaaaactaaaaaatttacaaatacatgaaaattaaacaacacactcttcagcatgctcaaagggtaaaataattaatattcagcatgatcaaagggtaaaataattaatattgtgaagatgcccgtactgctgagtgtaatctacagatttaatgcaatccctttcaaatatctaattttattttagcagaaatagaaaaagcaatccccaaattatatgaaattttaagaaacaatgaaacacccaataatcttcaaagagaggaacaacgttggaggcatcacaactccctgatttcaaaacacattatatagacttaaaaaaatttggtttggttataaaaagtgaactagaccaaataaagagaatgtagtataaatataaactctcacacatataatcacaggaagagttatttgcacgtccatattttttttttttttagatggagactcgctcttgtcacccaggctggagtgcagtggcacaatctaggctcactgcaacctctgcctcccaggttcatgccattctccttcctcagcctcccaagtatatgggactgtaggtgcccgccaccacactcggctaattttttggtatttttagtggagatggggtttcaccgtgttagccaggatggtctcgatctcctaactttatgatccacccaccttggcctcccaaagtgctgtgattacaggcatgagccaccacgcccggctgcacatccataatttttacagcattgttattgaaaggcaataggtgaaagcaatgcaaaattttctccccagattactggataaatataatttgaaacataaaaataatggaatattactcagtgtttaaaaacaggaaatacaggccaggcacactggctcacacctgtaatctcagcacattgggaggccgaggtgggtgaatcacctgagtttgggagttcgagaccagcctcaccaacatggaaaaaccccatctctacttacaaaaattagccgggcatggtggtgcatgcctgtaatcccagcctcctctcaggaggctgaggaaggagaatggtttgaacttgggaggtggagattgtggtgtgctgagatcgctgcactgaactccagcctgggtaacaagggcgaaactccgcctaaaaaaaaggaaatattctaacaaacaaccataacaaactttcatgaaattatgcagaataacatatgtcagccacaaaaaatatggtatgaatccacttacatgagatatttaaagcagttagactcaaaaacaggaaaacagaattgtttgtaaagggccagaaaatgggagaattgagtagttgtttaatgtgtattcagttttagttttgtaagacaaaaacattctacagatatattgtataataatgtcaatatagttaatataaactacatatttttaaattaagattctaaattttatgttcttgataattaaaagtaaacagtaataataccttaaaaaagggacaaaattgacagtttttaaaattaccttcaaatcaaaaaagtgtttctcccacacaaaaatagattcccaaatagatattagaagtaggagaatttttatgactactcagataaaacgaccattgatcactcacaaacatacaagtcataaacaatacagaaataatatgtgtatacacaaacacagaaattattatattgggaatagagatatgactgattcatatgtaactttggctccacgctgtcttaaagtgtacagaattgaatattgtcattcacaattgtcataaaaataaaaactaaaaacacaattaactgatgtcacttggcatactctaaaatatgaaacaaaaaagaaataaaattggctgggcgtggtggctcatgcctgtaatcccagcactttgggaggctgaggcgggcggatcatgaggtcaggagattgagaccatcctgactaacacggtgaaaccccatctctactaaaaaatacaaaaaattagctgggcatggtggtgggcgcctgtagccccagctgctagggaggctgaggcaggagaatggcgtgaacctgggaggtggagcttgcagtgagccgagatcatgccactgcactccagtctgggcgacagagcaagactgtgtctcaaaaaaaaataaaattaaatgaagtaaaatgaaataaaataaaattgcaaaacaaaatgaaaacatggaatgttaaacttactgaacaccattaagtagattactacatttggaaaagaaatcttagaagacgaatgtagggaaaaagtagttagaggggttatttgaagataaaagaggatgagaactttccaaatttttatgtgataaaagaaaaactaataccaatcaatactgtttgctttgaaattatttggaattattctggaattaaaaataaggaaacaataaagaacttacaaaataaacaaaaagtgaaggtatttatcaccacaggcatggtcccacaagaaatgctacatggtggccaggcaccagtggctcatgtctgtaatcccagagtcttgtgaggccaaggcaggcagattagttgaggctaagagttcaagatgagcctgagtaacatagtgagatgctgtttatttttttattgccgaaaagagtccatatgttgaaaaatataatgatgctgaacaatcttaaaaaactacatgaaactataaactttctgttaaatgtaaatatataaacacatatacaattgtttactaccataatcattaagcaaaatctcttaaaattctgctatagaatttcaacaaaaaatctgcataaatctgttaatagatacacaatataaaataatatttgtaataatgaaaaactacaggatgtaagcctgggcacaatggctcatgcctgtaatcccagcactttgggaggacgagatgggtggatcacaaagtcaggagttcaagaccagcttggctaagatggtgaaaccccatctctactaaaaatatgaaaaattagccggtcatgggggtgggtgcctgtcgtctcagctacttgagaggctgaggcagagcattgcttgaacctgggaggcggaggttgcagtgagccgagatcacaccactgctctccagcctgggtgacagagcgagactccatctcaaaaacaaaacaaaacaaaacaaaacaaacaaacaaaaaacccactacgggatgtaaagaggtatagtttttgtattcaactgaagttatgacgtactaatattgttataactttaaaatgttttacataatctccaattacctagataattacaagtttatagaaagtatgcaatacaaaatgagaaaggaaacaaagcataacactacaaactcaaaaaagcaaaaattaagacagtaaaataggaaattatggaaaacatctctacaagaaacacaaaaaataataacaatcaaaatggtaatagtaacttcatttctctatggaatcattttaaacataaattgattaaactaataataagaaattaaatggcccaatggaataagaacaaacaaaatcacacaatatgcaacaaatcacacaatattcttgttcaaacatagtgtactctgttaggacacataacaagccttattaagtttaagaagactaatcaggtgtggtggctcatgcctgtagccccagcactttgggaggccaggactggaagattgcttgagaccaggatttcaagagactcactttaactttgagtcaaataggttgaaagaaacagaatgaaaaagcatattccatgcaaacagtatccacaattaagtgaggtggtcataaattatattcgacaaaatacgctgtaaatcaaaaactagcatgaggtaaagattgttactatataatggtaacattggtcatttaccaggaatctataactattacatctatttaaaagatcagggttccaaaatatataaagctaatattgacagaagtgaagcaaaaaatacatagcaacataataatcacagacattaagaccccactttaataatgagtgaaagtttagataaaacatcaataagagaacaaaacctggatgacattataaattgtattaattcattttgtattgcaataagtacctaagactgtgtaatttataaagaaaaaagatttattttcttcatagttatgcaaaatgtacaataagtgtggtgccagcatctgcatctggtgagggtctaagtaagcttacaatcatggtgaaggcaaagagaaaccagacatattgcatggggagagagggagcaagcgtgaaaggaaagtgccaggttctttaaacacgcagctctcatgtgaattaacagagtgagaacttattgatcacgaaggggatggcgtgaagtcatttacaagagatttgctcccatgacccaaacacatcacacaaggatccacatcctacattgggaatcccatttcaacatgagatttgaagggtacaaacatccaaatcatatcataggccaactacacattaaaaatatgtacaggactctccagttaaaaggaagagattacacaatattcttgttcgaacttggtgcattctgttaggacacataacaagtcttattaagtttaagaagcctggccaggtgtggtggcgcaggcctgtagcccccagcactttgggaggaaagaccccttcagaccaggatttcaaaaccagcctgggcaatatagtgagaacccgcatttctaccaaaaatcaaaaaactagccaggcgtgaaagcacacgtatgtagtcccaactacttgggatgctgatgtgggaggattatttgagcctcggaggttgaggctgcagtgagccaagattgtaccactgcactccagcctgagtggcacagtgagaatctgtctctcaatagcaacaaaaataaataaataaatttaagatgaccaaaattatacagttatgttttctgactaaaataaaatgaaactagacatcaaaatcaagagataaactggcaaattcaaaaatatatggaaataaaacacactctttaatatattcttgctcaaggtccagataatttaatctaaatgtgaaaacaactcacggtggtgaagaaattccaatggtacattgttgaccagaaatattgtttaaaactttttaaattgattatgagctaaaactagccaaacacccatgagaaagaacaaagaggcattaaatttcctgatttcaaaatatattaaaaagctataataaacaaaagcaatgtggtactaacagagacaaatgaacagatgatagaacaaaatagcccagaaatgaacccttctttatataatcaaataatcttccacaaagctgccatgactacacaatagagaaaagaaaatatcttcaacaaatgatgctgaaaactgagtatctacactgaaaaaaataaagttggattattttcttgcacattttaaataaaataatgaaactaaaaaacatataactaatacaactcttagaagaaaaaaatagggaaaatacagaacactggttttggcacttttttgtagatatgacatcatacttatgaaaaacataaaaacccccaaaatttaactgtgctaaacttcaaattttctgcacaccaaagaaaatatttagtagaatgacaatgccaccgaagaaatgggggaaaatatttgcaaattacatgtgatgagttaatattcagaattataaacaactaaaactgaaaaactaacaatgaataaattgatttagaaatgcacaaagaattgaactgatgtttaatcaaaaatatatatgtaagtagaaaaaagcacttaaaataatgcaaaaaaagtaccaattgtagagaaatacaaaacaaaattacaatccaaaacaaaaccacctcatacccattagaatggccacgataaattttttaaatgccgaatctgttgaggatgtaaagaaattaaaactcatgtgaattgagtggggaaaaaggatgcaaccatcatattatgaatgtttcttaaaatttaaattatataattccacttataaacctagattcaaatataaatcatattatttgactggaatataaaatacatttttatatattaatatatatataaatggaatccaagaattccacttataaatctatattcaaacataaatataaatgtatactccaaatataaatctatatccaaacaaagaacgtggaagatatatttgaatatatatttcaaatattggtataataaatataccaatatttatatatttaatatatattaatataatatatattaaatatattataccaatatttatatattttatatataaatataatatatattaaataaataaatatattatataaataaatatatattttatatatattaaaaattaaatattggtataatatattataccaatatattatatataaatatatacacatatatttatatatatacaatatataaatatattataccaatatttacaaaagccaaaaggcagaagtaacccagatatcccttgactgataaacaaattaaaaatgtgacatatacatacagtggaatattattcagccttaaaatagtaaatctgtcacattcttacataaacattgagatattatgtcaactgaaataagatagtaataaagtgacagatactatatgattccatgatatgagtcatcataagtagtcaaatagaaacagaaaggagaatggtattactcaaggtctaaagagagggtaaaatgggcagttgttacttaatgggtattgtcttaattttagaagacgtaaaagttctagaggtctttacataacaatgtaaatactcttaacaactaaaatgtacaccttttttgaggtaggttctcactctgtcctgcaggctggaatgaagtcatataatcatagctcactgcagcctcaacctcccatgcacaagtgattctcctgccacggcctcacaaggagctaggaccacaggtggacaacccaacacctggctaattttaaatttttgtggggaagggctctctatatgctgcccaggctggtctcaagttcctcggcttaagcaatacttctgcgtcagtttcccaaagtacgggcattataggcatgagcctccaccacactcagcactgaaatatagacttaaaaaactttaagatggtaaattttatgtcatgtgttttcacatttttttttgaaaacaactaaaagtgatataggtctttctataaatcataaaatacataaatatataaacataaatcaccttcaaatcactaaagtgtttctctcacacaaagaaaatatatatatttatcattaaacacctagtgaatataccactgtttctatgactactcaccttcacataataagacaactgttgaaaatcagccaagaaggctgggcatggtggctcactcctgtcatgccagaactttgggaggccgaggcaggcggatcacctgaggtcaggaggtagagatcagcctggccaatatggtgaaaccccatctctactaaaaacacaaaaaaattagctgggcatggtggcaggcacctataatcccagctactcgggaggccgaggcaggagaattgcttgaacctgagaggcggaggttgcagtgagcaaagattgtgccactgcactccagctgggcctctactgtggcctgcagaccttggcctctactgtggccgctgaaggagttcagtgactcagtttcagctgtctttgccacagttcacaacaattcctgccaacacaggaacccacacagtgatgtggaaaaaaacttccaaatactcagtggtagccacacttaccacatcccgacataaggtccaccatatgcacacccaattgcagaaatctgtcctagtttctgcactataaataaaagtcctgaaggaaatccagcccgcccagacattagatgggaatcacaacaaccaaagcccctggtaaaaagccacttgaaggttgaatccactgcatacccagcagccttgtgacacagttataaactcttccttactacaagctcatagggcttcccattaccctgggaacaaaagaagatctgtacctcctgaaaacagtttataaaaaattaaagagctgtttgcttcttcaaatttatagacaccggggtaaggctacatggttccattgtcaatgtttctattttaacatagcagtgaaagtactttgcagaagaattagtcaagaaaatgaccctaaaaatgacattcaaattgaggaaaaaaattaaaaggttgctgtttgtaggtgacatgatcttataaatagaaaaccataaacaatacatcaaaaaataacaaatgccctcagaaaattagcaatatataacattaacatataattatcagttatgattccatatgctaacaacaaaccatctgataaaaaaggaagaaaacaatctcatttccaatagaattaaaataataaatttctgaaaaattaacaaagaaggcaaaagatcttttcactgaaacatatattgatgaaagaagtggaagaagtcacaaataaatgcaaaaagatttcaagtttatgaactggaagaataaatattataaagcaccatatgattcaaagtgatctacagtttcaatgaactctctattaaaaatccagtgacatttttcacagtaatggaaattacaattctaaaatttacatgaaactacgataggctttgaaaaaccaaagcaatctagaggaaaagggacaaagcaaccaaacttcatactttatgatttcaaactatattttaagattgtagtaaaaaaacagatgatacatgcaaaatatggacacaataaaccaatggcacagaatagagcccagaaataaacccagacatataaagtttactaatctttgataagtgcaccaaaaatatacaatgaacaaagtatagtctttttaatatttgcttctgaaaaaactggatacctccaggcaaaagaataaaattagcttatttttcttacaccatgctaaaagttaaattacagacttaaatatgaatccttaaaaaacctgaaaaaaaatacatggaaaaccctcatgatatggtcttaacaataatttgttagacataataccaaaagtacagcaacaaaagcaaatataaacaagctggactgcatcaaactaaaaaccttctgcacagaaaagagaacaataaaataaaaaaatttgtagaatgggaaaaaatatttgcaaaccatacatctgataaaagattgatatacaaaatatataagaaatgcaagcagattgaaagcaaaaacaacagtaacccagttcaaaataggcaaaaaactaaacagttatttgtccaatgaagacatacaaatggccaacacataagccataaagtactcaatatcaccaaatatcaggcaattgcaaatcaaaactatgatgagtatcatttcaaacatgttagaatggataatgtaaaaagaagaaacataacaagtgttgacaacactttgaagaaaaaaaattctgtacattcttggagagttataaattgatggagtcattacaaaaaccaatagaggttatctgaaatacagaactactacacaatctagcaatagtagtattgtgcatataatactgtgtatataacaaaaggaaatgaaataagtaacttgaagacatatctgtaccaccatatttgttgcagcattattcacaattgccaagatataaaaaacctaaatgttagtggatgctgaataaagaaaagctggtataaataaacaatagaatattatttagcctgaaaaataactaaatcttgccatttcaacaacatgggtaaaactggaagacattatgccaagggaaataagccagacatagaaagagaaatactgttcattctcacttatatggggaatctaagaaagctgaactcacagaagcagagactacaatggaagttgtcagggactagatatgggagaaaatgaaaagatattgaaaagacaaattttctgttatgagtaagtttttcaaatgtaatgtatagcttcatgatacagttaacactaaatttttgtatgcttaaaatttggtgtcagcagaccttagatgttttcattacaaaaaaggtacctatgtgaggaaaggtgataaaaatgctcagaaacataattgtgctaatcattttacaatatacacatgcagtaagtcattacattgtacacaataaatatatatacaatttttatttataaaaaaatccacaatacacacctacatatatatacacacatataaattacagttctggtaaactttatcctgaacaagataaaattaaaaaatagtaatttaaaaaacaaggaaagaagtgggagcttaacatatgctcagtaatgttctaagttccctgacatagtgaattgtagaaatgtaggaaatatctacgttatattacagttgagaaattaagacagaattgaaattaccaacctcagttagtactaaaagaataaaaatttcaattcaaataacattagatattcttaaagagatacttaatattctgattaaattaccgagtatgaatttctgtagaaacacatttgaaacctccataaaataagaaactataaagcagaaaacatacaacatatgtgggttgtatttctgggatttctgaaccaaatctcaatatcactacttttacatatttcagacacaatgcagaaagagaacttaaaaatgggtaaacacagggtttctaaaaaatatgcagctatttgtatatccctaaaagcaataaaagtagtcagattgtgcactgttttataagccataaagagaactttggctctcactgcaaatctgaagaaaaattattgaagaaaatgtagagtcactagagagcatgggacagaggatgcccctatgtgagaacaagtgaaaaaacccaggcttctcagaaaggatttccactggagcacagcttcccaaatcacatgtaaaagtccgggttcctctcggcctttggatgcctcatctatgtcatcctcttcttcattcgctttcacctacctgggtgcttcatactccatggctttttcctttgctccagacaggtgaccaggtctggcttagagaagacaatacctgttttattttaaaaagcatcatgagcatgacttttcctgggattctccatttaccaacctaatactgtgctaagtagagaaaagaggacataatagaagattctagaaaattaatcccaaaatactttttactgacagaacctttagcgtattcagaaagtatattaaatatgagtgtcctctgtttcactccccagtattactgaatcaaaaattggtggtggcaattgaattttaaggtgtggacaacattattttatgtcactaagtttctgaaattaccacttatctagagtgaataacatagataaactcaggaaaggggaaaattcaggtcaaaatgaaacaacctgaagaattcattttccacaccaaaaaatccgcaagattgtcttaaaaacagggatctgaaatttactcatgcaaagcagaaattaccaaaacacatcctacaaaggaagaaaatgaaaccttcagggtaaattagaaattctatattgaagttatcctcaaccaagaagacagagtttctgtagttctgtaacatcacatccatacacaaattctgctgagcagcatccaggtattgacactcctccagacagaattctatggctacatccctgaatgtcaacagtccctgaaaacacacacacacccacttcaagtggccataggcagaattcttaaattgactcaagataaaatgagtgaagagaactgattctgactgatacgaccaaaattgtcctataaaataattcccaacaaagaaatattctctgttgcattctctatctctgagaaaagagagcataagattcacaataccagtgtagtgtattgatgatattttttgaatgataaagtacaaaattaacaacaggaacatagacatgtacatttttgagtgctccatttaatcatacagtataagttctgcatatttctcagattaaaaagtcaggcttagttataaagtacctctcaaattttaatgtgtacaacaataaactggagatctttttatgcagattttgtttcaagaaacctgaggtaaaacctgagtttctgaatttctaacaagctcacaagtgacaccaatctttctggcccaagataaatattttgtcaaacattcattaagtgacagagcctgggtttttatgaccagtaaacaaagatgagagacttcactttttaaagaaagacatatgcaaagacaatctaagaagaaaagagaacttccagattacatgggatgctttattcacatcagctggtaaatgtccccaaggtactcaataataaagagaaaaataactctacagtggaaaaaaattctcagagaactatttaactcaacgaatcaaattaacaccaattataacagaacaaattttcatcatgcgctgatgctcacagaacgacacaatatcactgctgtgatactggcccccgccaaagaagtaaattataattcaaatctaatcataaagaaacaagttttatgcaaaatgcaaactacagtaatcgctcatgttgtgtaatctctattaaagtatttacgcagactttcttcagcattctagaaagcgagtatcttctaattatttttttcaaaactttctgaattattctgggtaacaaataccatcctgttcaaatgtgcatattttaatcctgttccacatggagttgatggagcacacagacagaacttcaacattacatattcccctttttcatgaatatctaagaaccccacctcttccccagtaggaatcttgggtatccatacctttccatgtgcaccagcaccagcaacaaagggtatttttctttttttttttttctttggagatggagtctccctctgttgcccaggctggagtgcagtggcacgatgtaggctcactgcaacctccagaacctccacctcctgggttcaagtgattctcttgcctcagcctcccaagtagctgggattacaggcacccgccaccatgcccagctattttttgtatttttagtagtgacagggtttcaccatgttggccaggctggtcttgaactcctgacctcaggtcatccacccacatcggcctctcaaagtgctgggataataggcatgagccaccgcgcccagccaaagggaatatttttaatattacgagtcataattaatgatgagaattccgcatggcagagaagaagccaagatgaagagaatgtcgagaagactctagtatatagaaaataatatatttcagagttgcttgactatcatgagaagaaaaaatgtttaaacaaacttatagggagaaacagcataaagtcaagaagtacaggtttgtaagttctaaacatatggcattccaggaggcagagtgaacactgctcctaatctgagacacagtcacctgagaaaaagccatttttctcttcatcatccttctctagcatttcttctcaggtgatattctctggacaagtcacacctgcatctttggaatatgcctttaaaggaatcagcacaatctcttcacctgctaccaccacaaacacaggtagaaagatccaggcatgcagaacatgtccacccatttatgttctttataacaggtgagattcaaggacagtgagctgctccacaaagatcaaaatttatctttctcttttcctgccacagacgccacaatttctgctacagcaatggggatatggaccacattaacttgtacctaccaaatccaaccatagtagaccctgtgacctccctttggaataaagtttgaactcaactctcatgaatgtattttgaattcctcgtgtttgaccctggcctcaacctggagtcacatgaggcacttaattatatcaacaaggatgcttccacccagaacaatatacagagcctgcgggaagggcacaagtgaaaagatttctgcaacctggccatggaatcttaattagaagcctgggccaagaaccacttagctaagcattgcctctcaaacttcaatgtgcatataaatcatttggtaaccctggccccacactatgtaatgtgattctgcaggttttaaaagcatccatgaaagtgcattttaaacacatctcctgtcaatgctgatgtagcttccacagacccatcattagtagcatttagctagaaaaagcaggcatagaacagactctcacactcatcattcatcacaacacaaatacttctgatcaaataaacaatcaatctctatcctgaaaaaacacattctttgctagctctttaaagtttacagagacaggagaaggcaacaatgtctgagtaagtctgcactgaaaaacaacatgtacacatatacttatgcaatgcttattaagcaggtactatgtgctcaggagtgtgttacagagcactgtgctgggaacatcacattatgtgatttaatcttcaaaacaacttgagagttgggtactaagtgttcaataatactcagaatttagatgaagggaccagcattgttttcttccctgtttatctcttaatgattattttcggggggggacagagtttcactcatgttgcccaggctggaagtgcaatggcacgatctcagctcaccacaacctccgcttcctgggttcaaaccattctcctgcctcagcctcccgagtagttgggattacaggcatgcaccacgacactgagctaagtttgtatttttagtagagatggggtttctccatattggtcaggctggtcttgaactcccgatctcaagtgatccacgcacctcgacctcccaaattgctagtattacaggcatgagccacagagcccggcctctcactgatttttttaaaaaaatgtatggcataagagataaatatagacagatgggagggatacagaaaggaaagggttaagtgtagtttagagggattttttagtgtgtttctatttactttcttgtgacttgtggagtaactactgggatggaatgtctctacaagcactggttttaattagaaagaaagaagttaagacctcaaaatatatagtttattgctctaatttatctgcttttgggtttcagaatattgtgagcataagctctggagaggcagcaggagccacctcccaaatctctggtctcctctaatgagttctgtgaggagagactccagggtgggaccagacctgaatgagtctcagaaaatggtgaatctggacagagctggggtggagaaactgtcctatgttgaattatgatctctatactgctggagtacttcttgttctgtctttcctaagcctgtccaagagaaacttaagagtttgtataattttaatccatttagccactactctattttataacgtataataataagcaatttaaccaaaatttttagggctttctaggataattttattagaaaatatgtattcttagcaaggtaaaagcaatagaaatacaaataactctcctgtttgagaatagctcttctggtggtgacatcagaagtcacaacaacatcagagccattgcccaagtccccttaacactcccactttattgtattgactatatgatgcttaattaaactatttatccagttgttctagactgagagtttttgaatgacagggaccatgactgcttcatctatttttctaaaggccatatgaaatggaggcaatttgtttatcagtctgagtctccagaactcctgaattttttgccaaggaaactggagaaactctcgtccaggtaccaaccaaggagattatttctacaaaagaaggaacagacactgaatgactcatttcccttcctctcacatggaagcagaattagacactcctgccagcctgacccaagtctgtacaggacatcctgaaatgtcttaaagattcccgggtgattgtgagaggattcctagtgaccatggactgatgaccgtatgttgatccaggtaggaaagactcaagctgattataaatagaaaatggaactgccctggtacagctccagaacctggatctatgtgtgatatcacctgttctgattagctaggtcttaggtaagagaaaggacaagaatactctactccagtatcacattttacaaataggtaaacttatgtcattgctctgggtattttgtggctttgatctctccctgctgacatgcatgtttacacttacagattgtgcaaccagattctatttacaccagcagcctctcacataaacatagcaggtcactggaaaagatctggaaagctcaaagggatacactctgaaaggagggctttaagatttctatgctgacatctcacagatcagaaaatgtctcctatgggttttctgtacattctcaatccaaaatctggctctctcctgtgattcccagggagagctcagctcttatgtacagattacaggtaagatcaacctgactcttcattctttggtgttacagcaaggagagtaaaaaaaaaaaaaagtttccatcataaagtctgctctaggacatgatatgtcagcctaaaaagaaaaggttaaggcaacactcatttaagtagagaatttatttgggccaagcctgaggattgaaatctgggagcatagattcaagttaccttgaatgtacactttacttagcagcagttacaagtggatttacaaaggcaaaagagagggacagggagtggactgaaacaaagttgtttgtcagaaattcttctcgatctacaaaaatacattgatgactaattggctatatatttttaagctgtgaggtattgcttataacatctagtgtggcattattaggttaatttatatctacttgtagggatagcaaacagtttcaagaggcaaacatgtagctcaaaggaggcagtagaacataattatgttctcatttttatgtctctccgagcctgataaaaccaaaaggacttgcaatcctcagatcaaagttattctttttcctctaatctcaagaccgagattcagaatttggtattgtagatttaggtcctggatggatggagaaatggcaggtgttaactgcacatttatgggaatttggggaggaggagaaagaggaactttgagatactcacatttactcaatgcacacatgtcaccctaattgttcttctgggcctaatagtctccaactcagtttcaggtctgaagacactatggtcactgaaagaggtgaaatggctgattactgtcctgtgaattttgtcaaccacttgtagaaaggcttaacctctctacgagtggttgtagaggactatagatgtgaaacaggcagagacacaagtctgcctgcatactctgggggcagtgtgcactttgaagcacaactgactgagttgactggaagcctgagggggaaagccttctctaaaatgaagcttggggggcaatttatacatatatacaatgtctggtaattgtgaacagggtttgagaaatataattaaaaggaaaattatctccagtcctagaaaaaccccacaataacagaccagaaagaaaagtgttttattgcacaacaaaaccagaatgtgatgtgacaagaatcacagacaatctgctcaagagattgcaaagacagaaaggtctctataattagtcctcaagtagaagacttgacagcaccatttgtcatacacagtttatcctgaattcacctggtaattggggaggccatctgtgtatgttaattggttatattgaaaggaaaaataaacttctgacatcttcatgatacgagatagttttgcaacttacagccaggtgcctgctgaatgtaggctctggttcttttacagacactgtgaaataggatactattcttttggctatttacatttcaaagcaaagggtccctactccctaggccacgggctgcagtaatcctgcttgccctgtcctggtggcctgtgtcccatctcttcccctaccatctaccactgaggcacagctcacagcacacagctggcagcccacattccacatggactccaaccaccacagctgcactccagagtcacattatggagcagggtccctgaactgcaggaggagaacctgcaggactcctgggtaggattgcacttttgcaataatggaaatgggagcaatgtttcagctacgtttctatttataatggtgacaaaaaaatactgctggattcccagcatgggtctggatagagtgccaaagagttctcattgtgacagcccaactcactcagaaacaccatgagacacttttgggtgtcccttctgaagacagacaccgaaagcattgaagagaaaaacagctctcagtctgaataaaattgtattaagaggttaaaggtatctgaaagaaaaattcagattacatataatattagccaagtcgaccagaaaatactcccctgagacagtttctctctaaacacccaaaatgcacagctgctctcaacacaagaaacacagtgttatgaagaaagggggcatattctcagcagaatttcttaagatttttcttccatctctgctgctctctcatctgctggccattggattgaggatctacactggaacacatcaggcaaccttcgccagcactttttgataaagaattggaatttgactctgtttacatagtagaactatatctgagattgcaacatatctaactgaagactattatgattcatgatttttgggtagtcacatcacttgcattgatttgttctgtaagagtggcattccaaatatagtaaaacataagaatagactgtgaggcaggatgcggtggctcacgcctgtaatcccagcactttgagaggctgaggcaggcggatcacctgggtcgggagttgaagaccagcctggccagcacggtgaaacaccatctctactaaaatacaaaaactagccaggggtggtggcagacacctgtaatcccagctacttaggggttgaggaaagagaatcgcttgaacccaggaggcagaggttgcagtgagctgagatcatgccactgcactccagcctgggtgacagagccagactccatctcaaaaacaacaaaaaaagatagaatgtaaaattttgctaacctactactctatctttttgttttgttttgttttttgagacagagttttgctcttgttgcccagactggagtgcaatggtgcaatctcagctcactgcagcctccacctcccaggttcaagtgattttcctgcttcagtctcccgagcagctaggattacaggcatgcaccaccatccccggctaattgtgtattttttttagtagagacgtggtttctccatgttggtcagggtagtctcaaacttctgacctcaggtgatctgcctgcctcggcctcccaaagtgccgtgattataggcgtgagccaccacgcccagctgacctattattatatctatgggatgaattaataagcatgtcagattaatatctactgtaacaattagatagtaaattttctttggatattagatataaatatctaagtataaataatcttaatatactagtaatggcatacatttttaaaattatctgtaaccttaactcagttgtaattatatttcaaaagaataaatactgatattaaaattactatttaagggatttattcatagtaaatagtgtggccttatattcacatgattgtagaaaatactgtttaatttacatggatgaatgttgtctactgaagactacataaaactatgttaattcttttttaaatttttttatttaattttttaaatttattattacactttaagttttagggtacatgtgcaaaatgtgcaggtttgttacatatgtatacatgtgccatgttggtgtgctgcacccattaactcatcatttagcatttggtatatctcctaatgctatccctcacccatccccccacactgacctcacataggattccagaacactgctgggttctgagtgtttgtccctcacataggattccagaactgttctgtaatcctttgtaagggataaacattcagaccctcgtagcagtgttccggaatcctatgtgagggacaaaaactcagaacccagcagcagtgttctggaattctgtgtgagcgacaaacattcagaacttcgtagcagtgttctggaattctatgtgagggacaaacactcaaaacccagcagcagtgttctggaatccaatgtgaggtacaaacactcagaacccagcagcagtgttctggaatcctatgtgagggaaaaacagtctgaactcagcagcaggtttccggaatcccatgagagggacaaatactcaaaacccagcagcagtgttctgggatcctatgtgagggacaaacactcagaagcagtgttctggaaccttatgtgagggacaaacactcagaacccagcagcagtgttctggaatcctatgtgatggacaaacacccagaacccatccactgtcttctggaatcctatctgagggacaaacattcagacactcgtagaagtgttctggaatcctatgtgaggaacaaacactcagcaaccaggagcagtgctctgaaatcctttgtaagggacaaacaaacagaatccagtagcagggttccagaatcctttctgagggaaaaacattcagaccctcttagcagtgttctggaatcctatgtgtgggacattcagaccctcatagcagtgttctggaaaccaatgtgagtgccaaacactcagaacccagcagcagtgttctggaatacttggtaaggaacaaacattcagacaatcgtagcattgttctggaatcctaagtgagggacaaacactcagaaatgagctacagtgttctagaattctatgtaaggaacaaaccctcagtaccgagcggcagtgttctggaatcctatgtgagggacaaacactcagaacaaagcagcagtgttctggaatcctctgtgaaagacaaacactcagatcccagcagcagtgttctgataccctatgtgagggacaaacactcagaacccagccactgtgctctgaaatcctatctgaaggacaaacattcggagcctcgtagaattgttctggaatcctatgtgagggacaaacactcagaaacttatagcagtgttctgggatcctttgtgatggacaaacaaacagagcccagcagcagtgttctggaatcctatttgacagacaaacactcagaactcagaagcagtgttctggaatcctttgtgagggacaaacattcagaacctagtagcagtgttctggaattgtatgtgagggacaaacactcagaacccagcagcagtgttctggaatcctatgtgagtgacaaacactaagaaaccagcagcagtgttctagactcctttgtgagggacaaacattcagaccatcgaagcagtgttctggaatcctgtgtgagggacaaacactcagatccagcagcagtgttctaaaatcctttgtgatggacaaaaattcagaccgtcgtagccgttttctggaatccaaagtgagggacaaacactcagaacccagcagcagtgttctggaatcctatgtgagggacaaacattcagaacccagcagcagtgttctggaatactctgtgagggaaaaacattcagaccctcgtagcaatgttctggaatcctatatgaggggcacacactcagaaccccgcaacagtgttctggagtcctttgtgagggaaaaacattcagaccctcgaagcagtgttctggaatcctatgtgagggacaaacactcagaacccagcagcagtgttctggaatcctgtgtgagtgtcaaacattcagaacccagcagcattgttctggaatcctatttgagcgacaaacattcagaacttcgtacctgtgttctggaatgctatgtgagagacaaacacagaaccgagcagcagtgttctggaatcctatgtgagggagaaacactcggaacccagcagcagtgttctggaatcctatgtgagggtcaaacactaagaacccagcagcagtgttctggaatcctttgtgagggacaaacattcagaaccttgtagtagtgttctggaattttatgtgagggaaaacactctgaacccaacaggagtgttttggaatcccatgtgagggacaaacacacagatccccgcagcagtgctctggaatactttgtgagggacaaacattgagactctcaaagcagttttctggaatccattgtgagggacaaacagtcagaacccaccgcagtgttatgaatcctttgtgacggacaaacattcagaccatcgtagcagtgttctggtatcctgagtgagggacaaacactcagaaaccagcagcagtgctctggattcctttgtgaggggtaaacaaacagaacccagcaggagagttctggaatcctatgtgagggacaaacactcagaacccagcagcagttttctggaatcctttgtgagggacaagcattcagaaactcgtagaagtgttctggaaacgtatgtgcgtgacaaacactaagaaaccagcagaagtgctcccgaatcctttgacagggacaaacaaatagaaaccagccacagtgttctggaagcctttgtgggggaaaaacattgagacccccgtagcagtgttctggaatcctatatgagggacaaacactcagaacccagcagcagtgctctggaatcctttgtgagggacaaacattcagacactcagcagtgttctggaatcctatgtgaggggaaaacattcagatcgtcgtagcattgttgtggaattctatatatgggacaaacactcagaacccagcagcagtgctctggaatcctatgtgagggaaaaacacccagaacccagcaggattgttctggaatgctatgtgtgggacaaacactcagaacccagcagcagaggtctggaatcctatgtgagctacactcagaacacagcagctgtgttctggaatccttagtgacgtacaaagtttcagaacctcacagcagtgttctggaatcgtatgtgagggacactcagaacccagcagcagtgttctagaatcctttgagagggaaaaacattcagacccttggagcagtgttctggaatactatgtgatggacaaacactcagaacccagcagcaatgttctggagtcctttgtgatggacaaacattctgaccctagtagcagtgttctgcaatcctatgtgggggacaaacactcagaacccagcagctgtgttctggaatcccatgtgagggataaactctcagaacccagcagcagtgttctgtaatcctatatgagtgagaaacactcagaaccctgcagcagttttgtagattccactgtgagatacaaacattcagaccctcgtagaagtgttctggaatcctatgtgagggaaaaactctcagaaacctgcagcagtgcactggagtcccttgtgagggacaaacaaacacaactgagcagcagtgttctggaatcctttgagaggcaaaaatattcagaccctcgtagcagtgttctggaatcctatgtgagggacaaacactcagaacccagcagcagtattctggaatcctatgtgggggacaaacacaacccagccgcagagttctagaatcctctgtgagcgacaaacattcagaaattcatagcagtattctgaaatcctatatgagggacaaacactcagaacccagccactgtgttctggaatcctatgtgtgggacaatcattcagaccctcgtagctgtgttctgtaatcctatctgagggacaaacattcagaccttcgtatcagtgttctggaatcctatgtgagggacaaactctcagaacccagcagcactgttctggaatcctatgtgagggacaaacactcagtacccagcagcagtactctggaataatttgtgagggacaaacattcagatcctcgtagcagtgttctggaatcttatgtgagggacaaacactcagtacccagcagcagtactctggaataatttgtgagggacaaacattcagatcctcgtagcagtgttctggaatcttatgtgagggacaaacacttagaacccagcagcactgttctggaatcctatgtgaaggacaaacactcttaacccagcaggagtgctctggactactttgtgagggacaaacattcagacaatcatagcagtgttctggaatcgtatgtgagggacaaacactcagaacccagcaacagtgttttggaatcctatgtgagggacaaaccctcaaacctagcagcagtgttctgtaatccaatgtgaggggcaaacagagagaacccagcagcagtgctctgtaatactttgtgacggacaacattcagataatcgtagcagtgttctgcaatcctatgtgagagacaaacccaaagaaaccagcagcagtgttctggaatcctatgtgagggacaaaccctcagaacctagcggcagtgttctggaatccaatgagagggacaaacactcagaactcagcagcagtgttctctaatcctttgtgagggacaacattcagatcctcgtagcagtgttctggaatcctatgtgagagacaaacactaagaaactagcagcagtgttctggaatcctatgtgtgggacaaacactcagaacccagcagcagtgttctggaatcctttgtgagggtcaaacactcagactctcagagcagtgttctggaatcctatgtgagggacaagcattcagaccctcatagcaccattctggaatgctctgtgaggaacaaatattcagaccctcatagcagtgttctggaatcatatgtgaggtacaaaatctcagaactcagaagcagtattctttaattctatgtgagagacaaaccctcagaacccagcagcagtactctggaataatttgtgagggacaaacattcagacaatcacagcagtgttctggaaaccaatgtgaggaccaaacactcagaacccagcagcagtgttctggaatatttggtaagggacgaacattcagacaatcttagcagtgttctggaatccaaagtgacggagaaacactcagaaacgagctgcagtgttctagaattctatgtgagggacaaacactcagaacccagcagcagtgttctggaatccttagtgaatgacaaacgctcagaacccagaagtagtgttttagactggtttgtgagatacaaacattcagaccctcaaagcagtgttgtggaatcctatttgagggacaaacactcatcacacagccactgtgttctggaatcctatctaaaggacaaatattcggagcctcttagaagtgttctggaatcctatgtcagggacaaacattcagaaaccagcagcagtgctctggaatcctttgtgagggacaaacaaacagagcccagcagctgtgttctggaatccgatttgatggacaaacactcagaacccagcagcagtgttctggaatcctttgtgagggacaaacattaagatcctcagagaagtgttctggaatcctatgtgagagacaaacactcagaacccagcagcagtgttctagaatcctatgtgaaggacaaacactcagagcccagcagcagtgttctgcaatcctttgtaagggtcaaacactcagacgctcagaacagtgctctgtaatcctatgtgagggataaacactctgaaccctgcagcagtgttctggattcatatgtgagggacaagcattcagatcccgatagccctgttctgcaatgctctgtgagggtcaaacattcagaacctcatagcagtgttctgaaatactatgtgaggtacaaagcctcagaactcagcagtagtgttctggaatcctatgtgagtgacaaacactcagaaaccagcagcaatgttctagaatcctttgtgagggacaaacatttagactctcgaagcagtgttctgttatcctatgtgagggacactcagatccagcagcattgttctagaatcttttgtgatggacaaacattaaggtcctcgtagcagttttctggaatcctatgtgacggggcaaacactcagaacccagcagcagtgttctggaatccagtgtgtggtacaaacactcagaaccgagccagtgtgtactggaatcctatctcagggctaaacattcagaccttcacagaagtgatctggaatcctatgtgtgcaacaaacactaaataaccagcagcagtgctctggaatcctttgtgagggacaaacaaacagaaaccagcagcagtgttctggaagtctttgtgagggaagaacattcagaccctcgtagcagtgttctggaatcctacgtgcgggacaatcactcagaagccagcagcactgttctggaatcctatgtgaaggacaaatattcagaacccagaatcaatggattcctaagtgaaggataaactctcagaactcagcagcagttgtctgcaatcttttgtgagggacaaatattgagactctcaaaccagtgttctggaatcctatgtaagggacaagcattcagagtctcatagcagtactctggaatcctatatgaggtacaaacacgaaaaacccagcagcagtgttctggaatcctatgtgagggacaaacactcagaacctagcaacagtgatctggaatcctatatgagggacaaacattcagaccctcgtagcagtgttttggaatcctttgtgagggacaaacaatcaggaaccagcagctttgttctggaatcctatgggatagatgaacactcagaacccagcatcagtgttctggaatcctttgtgagggacaagcaatcaggacacagcagctctgttctggaatcctatgtgagggacaaacgttcagaccctcgtattagtgttctggaatcctatgggagggacttacaaacagaacccagtgacagtgttctacaatcctttgttagggaaaaacattcagaccctcgtaacagtcttttgaatcctatgtgagggaaaaacattcagaccctcatagtagtgttctggaatcttatttgaggggcaaacactcagaacccagcagcagtgttctggaatcctttgggagggataaacattcagacccccttagcagtgttctggaatcctatgtgagggacaaacactcagaacccagcagcagtgttctggaatcctatctgaaggaaaacattcggaacctcttagaagttttctggaatcctatgtgagggacaaacactctgaagccaatagcagtgttctggtatcctatatgagggacaaacactcagaacccagcagaagtgttctggaatcccatatgagggacaaacacaaaccagcagcaaatgttctggaatcctatgtgagggacaaacattcagaccctaggagcagtgttctggaatcctatgtgaaggaccaacagtaagaacccagtagcagtgttctggaatcctatgtgagggacaagaattcagacactcgtagcagtgatacagaatgctttctgaggggaaaaacatgcagaccctcatagcagtgttctgaaatcctatgtgagggacaaacactcagaagccagcagcagtgttctggaatcctttgtgtcggacaaacactcagaactcaaaagcagtgttctggaatccctttgagggacaaacactcagaccctcatagcagtgttccggaatcgtatgtgagggacaaactttcagaacccagcagcagtgttctggaatccttggtgaggaagaaactttcagaccctctgagcagtgttttggaatcctatgtttgggacaaacactcagaacctagcagctgtgttctgcaatcctatgtgagggacaaacactcagaacccacaagcggtgctctggactctttgtgagggacaaacattcctacattttagcagtgttccagaatctcatgtgatagagaaacgctcagaacccagcagcagagttctagaattctacgtgagggacaaaccctcataacctagcagcagtattctgcaattctaattgaaggacaaaccttcagaacccagcagcagtgttctcgtactcaatgacagggacaatccctcagatcccagcagcagttttctggaaacctatgtgaggaacaaacactcagaacccagcagcagtgttctggaatccaatgtgagggacaaacactcagaaaccagcagcagtgttctggaatcctatgtgagggacaaacactcagaacccagcagcatttttctgaaatcctttgtgagagacaaactttcatagccttgtagctgtgttctggaatcctatatgtggaacaaacactcagagcccagaagcagtggtctggaatcctgtgtgagggacaaacactcagaccctcgaagcagtgttctggaatcctgtgtgagggacaaacattcagatccagcagcattgttctggaatcctttgttatggacaaaccttcagatgctcatagcagttttctggaatcccttgtgagggacaaacactcagaacccagcagcagtgttctggaatcctctgtgagtgacaaacactcagaaaccagcagcagtgttccagcatcctttgtgagggacaaacactcagaccctcgaagcagtgttctggaatcctatgtgagggaccaacactcagaacccagccactgtgtactggaatcctatctgagggacaaatattcaaaccaccgcagaagtgttctggaatcctatgtgcagaacaaacactaagaaaccagcagcagtgctctggaatcctttgtgggggacaaacaaacagaacccagcagcgttctggaatcctttgtgagggaaaaactttcagaccctcatagcagtgttctggaatcctatatcagggacaaacactcagaacccagcagcagagttctgcaatcctttgtgagggaaaaacactgagaccctcttagcagtgttcttgaatcctacatgagggaaaaacattcagaccctcataacattgttctggaatccaatataagggacaagcactcagaacccagcagcattgttccagaatcctatgtgagggacaaacactcagaacccagcagcagtgttctggaatcctatgtgagccacaaacattcagaacttcatagcagagttctggaatcttatgtgagggacaaacactcagaacccagcagcagtgttctggaatcctatgtgagggacaaacactcagaacccagcagcagtgttctggaatcctttgtgagggacaaacattcagaacctcatagcagtgttctggaatcgtatgtgagggataacactctgaacccagcaggagtgtttttgaatcccatgtgagcaacaatcactcagaaccctgaagcagtgttctggaatcctatgttagtgacaaactctcagaacccagaagcagagggaaaagaaactaccaagtgtagccaagatggccgaataggaacagctccggtctacagctcccagtgtcagcaatgcagaagatgggtgatttctgcatttccatctgaggtaccaggttcatctcactagggagtgccagacagcagatgcaggacagtgggtgcagtgcacagttcatgagccgaagcagggtgaggcactgccccactcggcaagtgcaaggggtcagggagttccctttcctagtcaaagaaaggggtgacagacagcacctggaaaatcgggtaactcccaccataatactgcgcttttctgatggtcttaacaaatggcgcaccaggagattatatcctgcacctggctcagagggtgatacgcccacggagtctcgctgattgctagcacagcagtctgagattaaactgcaaggcagcagcaaggcttggggagggtcgctcacaattgcccaggcttgcataggtaaacaaagtagccaggaactcgaactgggtggagcccaccacagctcaaggaggcctgcctgcctctttaggctccacctctgggggcagggcgcagacaaacaaaaagacagcagtaacctctgcagacttaaatgtccctgtctgacagctttgaagagagcagtggttctcccagcacacagctggagatctgagaacaggcagactccctcctcaagtgggtccctgacccctgacctccaagcagcctgactgggaggcaccccccagtacaggcagactgacacctcacacggccgggtactcctctaagacaaaacttccagaggaacgatcagacagcagcattcgcggttcatgaaaatctgctgttctgcagccaccactgctaatacccaggcaaacagggtctggagtggacctctagaaaactccaacagacctgcagctgagggtcctgtctgttagaaggaaaactaacaaacagaaaggacatccacaccaaaaacccatctgtacatcaccatcatcaaagaccaaaagtagatacaaccacaaagatggggaaaaaacagagcagaaaaattggaaattctaaaaagcgagcacctctcctcctccaaaggaatgcagttcctcaccagcaatggaaaaaagctgggcggagaatgactttgacgagttgagagaaggcttcagacgatcaaactactctgagctacaggaggaaattcaaaccaaaggcaaagaagttaaaaactttgaaaaaaatttagacgaatgtatatctagaataaccaatacagagaagtgcttaaaggagctgatggagctgaaagccaaggctcgagaactacgtgaagaatgcagaagattcaggagccgatgtgatcaactggaagaaagggtataagtgatggaagaagaaatgaatgaaatgaagcgagaagggaagtttagagaaaaaagaataaaaagaaatgagcaaagcctccaagaaatatgggactctgtgaaaagaccaaatctacgtctgattggtgtacctgaaactgacggggagaatggaaccaagttggaaaacactctgcaggatattatccaggagaactcccccaatatagcaaggcaggccaacattcagattcaggaaatacagagaatgccacaaagatactccttgaaaagagcgattccaagacacataattgtcagattcaccatagctgaaatgaaggaaaaaatgttaagggcagccagagagaaaggtcgggttacccacaaagggaagcccatcagactaacagtggatctcttggcagaaactctagaagccagaagagagtgggggccaatattaaacattcttaaagaaaagaattttcaatgcagaatttcatatccagccaaactaagcttcataagtgaaggagaaataaaatactttacagacaagcaaatgctgagagattttgtcaccaccaggcctgccctaaaagagctcctgaaggaagcactaaacatgaaaaggaacaaccagtaccagccgctgcaaaatcatgccaaaatgtaaagatcatcgagacaaggaagaaactgcatcaactaacgagcaaaataaccagctagcatcataatgacaggatcaaattcacacataacaatattaactttaaatgtaaatggactaaatgctccaattaaaagacacagactggcaaattggataaagagtcaagacccatcaatgtgctgtgttcaggaacccatctcacgtgcagagacacacatatgctcaaaataaaaggatggaggaagatctaccaagcaaatggaaaacaaaaaaagggaggggttgcaagcctagtctctgataaaacacaccttaaaccgacaaagatcaaaacagacaaagaaggccactacataatggtaaagggatcaattcaacaagaagagctaactatcctaaatatatatgcacccaatacaggagcacccagattcataaagcaagtcctgagtgacgtacaaagagacttagactcccatacaataataatgagagattttaacaacccactgtcaacattagaaagatcaatgaaacagaaagttaacaagggtacacaggaattgaactcagctctgcaccaagcagatctaatagacatctacagaactctccaccccaaatcaacagaatatacattcttctcagcaccacaccacacctattccaaaattgaacacatacttggaagtaaagctctcctcagcaaatgtaaaagaaaagaaatcataacaaactgtccctcagaccacagtgcaatcaaactagaactcaggattaagaaattcactcaagactgctcaactacatggaaaatgaacaccctgctccggaatacctactgggtacataatgaaatgaaggcagaaataaagatgttgtttgaaaccaatgaaaacaaagacacaacataccagaagctctgggacacactcaaagcagtgtgtagagggaaatttatagcactaaatgcccacaagagaaagcaggaaagatctaaaattgacacccgaacatcacaattaaaagaactagaaaagcaagagcaaacacattcaaaagctagcagaaggcaagaaataactaaaatcagaacagaactgaaggaaatagagacacaaaaaacccttcaaaaaattaatgaatccaggagctgattttttgaaaagatcaacaaaattgatagaccgctagcaagactaataaagaagataagagagaagaatcaaatacatgcaataaaaaatgataaaggggttatcaccaccgatcccacagaaatacaatctaccatcagagaatattacaaacacctctacgcaaataaactagaaaatctagaagaaatggataaattcctcaacacgtacactctcccaagattaaaccaggaaaaagttgaatctcggaatagaccaataacaggatctgaaattgtggcaataatcaatagcttaccaacaaaaaaaaagagtccaggaccagatggattcacagccaaattctatcagaggtacaaggaggaactggtaccattccttctgaaactattccaatcaataggaaaagagggaatcctccctaactcattttatgaggccagcatcatcctgacaccaaagcctggcaaagacacaaccaaaaaagagaattttagaccaatatccttgatgaacattgatgcaaaaattctcaataaaatactggcaaaccgaatccagcagcacatcaaaaagcttatccaccatgatcaagtgggcttcatccctgtcatgcaaggctggttcaacatatgcaaatcaataaatgtaatctagcatatcaacctaaccaaagacaaaaacgacatgattgtctcaatagatgcagaaaagacctttgacaaaattcaacaactcttcatgctaaaaactctcaataaattagatattgatgggacatatctcaaaataataagagctatctatgacaaacccatagtcaatatcaaactgaatgggcaaaaactggaagcattcactttgaaaactggcacaagacaggattgccctctctcaccactcctattccacatagtgttggaagttctggccagggcaatcaggcaggagaaggaaacaaagggtattcaattaggaaaagaggaagtcaaattgtccgtgtttgcagatgacatgattgtatatctagaaaaacccattttctcagcccaaaatctccttaagctgataagcaaattcagcaaaatctcaggatacaaaatcaatttacaaaaatcacaagcattcttgtacaccaataatagacaaacagagtgccaaatcatgagtgaactcccattcacaattgcttcaaagagagtaaaatacctaggaatccaacttacaagggatgtgaaggacctcttcatagagaactacaaaacactgcttaatgaaataaaagaggatacaaacaaatagaagaacattccatgctcatgggttggaagaatcaatatcatgaaaatggccacactgcccaaggtaatttacagattcagtgccatccccatcaagctaccaatgactttcttcacagaattggaaaaaactactttaaagttcatatggaaccaaaaaagagcctgcatcaccaagtcaatcctaagccaaaagaacaaagctggaggcatcacgctacctgacttcaaactgtagtacaagactacagtaaccaaaacaacatggtactggtaccaaaacagagatatagatcaatggaacagaacagagccctcagaaataatgctgcatatctacaactatctgatctttgacaaacctgacaaaaacaagcaacggggaaagattccctgtttaatcaatggtgctgggaaaactggctagccatatgtagaaagctgaaactggatcccttccttacaccttatacaaaaattaattcaagatggattaaagacttacatgttagacctaaaactataaaaaccctagaagaaaacctaggcaataccattcaggacataggcgtgggaaaggacttcaggtctaaaacaccaaaagcaatggcaacaaaagccaaaattgacaaatgggatctaattaaactaaagagcttctgcacagcaaaagaaactatcatcagagtgaacaggcaacctacaaaatgggagaaaagtttcacaactttctcatctgacaaagggctgatatccagagactacaatgaactcaaatttacaagaaaaaaacaaacaatcccatcaaaattgggtgaaggacacgaacagacacttctcaaaagaagacatttatgcagccaaaaagcatgcaaagatgctcatcatcactggccatgagagaaatgcaaatcaaaaccacaatgagataccatctcacaccagttagaatggtgatcattaaaaagtcaggaaacaacaggtgctggagaggatgtggagaaataggaacacttttacactgttgatgggactgtaaactagttcaaccattgtggaagtcagtgtggcgattcctcagggatctagaactagaaataccatttgacccagctatcccattactgggtatgtacccaaaggactataaatcatgctgctataaagacacatgtgcatgtatgtttattgtggcattattcacaatagcaaagacttggaaccaacccaaatgtccaacaatgatacactggattaagaaaatgtggcacatatacaccatggaatactatgcagccataaaaaatgatgagttcatgtcctttgtagggacatggatcaaactggaaatcatcattctcagtaaactatcgcaaggacaaaaaagcaaacacagcatgttctcattcataggtgggaattgaacaatgagaacacacagacaccggaaggggaacatcacacttcagggactgttgtgtggtggggggaggggggagggatagcattaggagatattcctaatgctaaatgacgagttaatgggtgcagcacaccaacatggcacatgaatacttatgttgcaatcctgcacattgtgcacatgtatcctaaaacttaaagtataataataaaataaaataaaataaaaaagcaaaatatacactaatacagattaaccaactaaaaaaagtagagaaaggttatttaaaaaatataaagcatacagtaataatctaacacgttgaaatctaagaaggagaaaacagctggtctgaacagcattttaagtggcaatgttagaggttttatcaaaattgaccaataatattaatccacaggttcaggaggctttgcaaaccaaatgaaaacacacagagaggacacacctaggaacataatgggacaatttctgaaaagtaaaagaaaaatgtcaaaagcacttgataaaaaaattgggctaactataaacagaaagagttgactgatgacaaccttctcaaatgaaactatgaaagccaacaagtgaggtattgatacctttcaagtcctgaaataaaataagtgccgacctagaactgtctacttggtggatatatccatcaaaagcaaagatacaataaagaatttatcccaagcagacccacaggaaaagaaatactaaagattattcttcaggtagaagagctatgatccctgatgaaagtttgcagttagaagaacgctttttttaatgaaagaaataaacatagagagaaatttaattggatatcgactgtataacagaatactatctcataaagtttaaaatgcatcttccatacaacagcagaagcatataagttgtgagttggataaattaattttaaaatattgtcaagtttttttgcaaatagacaaatgtaccaattatattagaccctgaatgcacgttgtaataaaccagttaaaacataatcagaccagattttttaaatggactctcttaaagtttttaaaatttatatttatatttcacatatgttgaaattaaataatggaaaagcatgcaatgcaaatattaaacaaaatatagctttagttgtacttatattcacatttaaaaagttggacacagttaagtctcagtgatttttttacacaacggaggcaagctgtgcagttataactagtattatgttatgctcttggcctgattacagaagggaaaggggcactcataccagataatggcagaatgaagcaacaaggagtagagttacagaacatgatgctgtaactgggactggagttactcttttagagttaaagaatagtaaactggacaaaatatatgaaactttttttgaaatactgaacatcaggcagcacaggactgtgctccgcaagagaaaagaaggagccagaatgactcctgctttattcccaggttctccgtgacagcagtagagaggaatcccagagagagcagacattgtcattgcactgaggaaccagataaaaaccaaaatgttaagcagctggaatatgtagtagaagagaacgtttacagaaaaaggaaccaataatcagcctaaggtttctcccaagtccctaagccaaatgtacataggatgaaattctaaggagctcagcaaaggactaccagggagttggaagaacacttccctggcatcacatgacaggaagacatgttagctctgaccagccagagaagggaatcccctctgtacttccaggatattcagtaaagaccactggaggttcatgccctagtgacagtgctcatttagctccaaattacagatggctctagactaactcaacaaagtctaaagagaagatttaaaacaacaacagaaaaatagtcatcctgaagttactgaactgcctgccacaacattgttcaaatgtagccaataaaatctagatattcaatagcataacatcaaaataccccccccccaaaaaaaactctgacatgcaaagaagccggaagatatatattattaagatatacattaagaggaaaaaataagtcatttatcaatgacagaagaaggaattttcaaggtccttaatgtaattatattttataaatacatatagataaatacatatatatgtcaaagtacttaaatgaaaattgaacataggagaaaaatggaagttataaaatgaaaaatgtgacacgtatagatgaaaaataaatatttgaaataaaaattccatgagatagaataagtcatggattttaccctaacatcagaaaatatatagaaaaattagaagctttacaaactaaaggacaaagggtaaactaaaataagaaatccagaaactcactgatacgtgagacaatatgcagcagtgtaacatacatttaattaatatctcaaaagggatgggtgggggaattatagttgaataaagaatggtacattcattcctgagggcaccgaggagggaggatagcttgagattcctaagggagggcattatccattcatgaaggttcatccccatgaccaaacacctcccagtaagccccacctgcaacattggggatcaaattttaacaggagatttggaaggggcaagcattcaaaccataacaagagttaaatttccctttaaaaaaatcactgatatgattccatttcgccatagataaaaactatcatttcagcctaccattgagtgtacttatagctaacggaaagggcactttgtctcgggaatacagatttgcctagaggtatcctattgcagtcaaagaaagaacaatgagggatagaaaatgttagtgatggagacaccaacgctgcattttacaacaaacaatgtaaaaactttacggattgcttctgctaacttactaaagtttacgttcctctcaggtgggagaattgttgagttttttcttaagatagaaaagcaattcagataatctgaaatctccacaagaaggataagaagcacagcagaaactattctaggcaggaagtcaatccattcaactgtctgtgctccatagaaacaactgtctgcactgggagtcatacgaggtacagacaacagccagacctctgatcctctcattagtgatttcagaagaaattaacagtcagctgagtaattcactgagtaaagtaaacatttggcactgacagaggttagacggataactatttgtatcaccatattcatgaagctggaatattttccattactggtatcacatccgaatggaagatgttaaaaggtctctcatcttgtaagatggatatgaaagaacattttctgagaaatgaaattattcacacaccagcgaggtggatggaagagaaaaaaaaagaataatcagcttgagttcttctccttgataagacaactcactaaaaacataaagagaaaaatacaagttaaaataattaaccagaagaagactactctagactttttaaattgctgataagattttaatttgctccaagttgaaaataactatatcgcttgtgttttaaggcacataatgagcaattatatcacacatgatagattcagcagtaaaatattatccgttaacagctggaactcataaaagcatagcacaatgtgaagatggaatttgctaaaataaaccatctgctgaaaaatactattctgcaaatttaaaaataaagtttaaatgttatttgtcttatttaataggtctgtgaaaaaatgcgatatttgaaaagtaggtgctaacttaattagttctttatatttcccttgaagctttaattatttgagtctatcaaacaatagactcaattaacaggaaaaaaggtttacggatataattatgtgcacaactatgcacttggagtttacataatatatataaatatgtatatacaaatatttgtatattataaatcgatatacaaatatatactatatatgtataaaaactccaggaaaggcaaggtagtcaacacgcctatgctgtcttgaggttacagaaaacacagagctgtactttgctaaatcaggctttgcagaaggcaggtgacgacaaggaagaaagaggagcctggcagcagaagttgtcttgttacatggatgaaacctcacagggagcagccctcctcttgggaagtaaagataggaaatggttttttgaaatgtaaacgtgccagactcagttaatctttcctaaacccagacaagggagtatctcagggaaagcctgtctatatcaatgcagattttctctacaaatgcaaatctccccaacaaacacagcttttcagctatttttgtagaagaagctatttccagtcttccgagtagctatcttgaaatatgtcaaaaagttggccaggcgcacgcctgtaatcccagcactttgggaggctgaagtgggtagatcacctgaagtcaggagttcgagaccagcctgaccaacatggtgaaaccgcgtctctactaaatacaaaaaattagctgagtgtggtggtgcatgcctgtaatctcagctacttgggaggctgagctaggagaataacttgaccctgggaggctgaggttgcagtgagccaagattgtgccattgcactccagcctgggcaataaaagcaaaactccatctcaacaaaaaaagtattttagggtaatattttgagtatctttacctccatatgtacaataaatattattgtgatttttaatctttacttttctgtggagaaaacataggtgtgatttctagtgtagctgaacatcacgtttattgacaatattgcacttgtgtgtgggtgtgtgtgtgtagctactctttacctttgttctcacgtaatgattagatattaacaattaattcagtaaaatgtatgttttgcaatatttctccatgttattatgctttaaattagtttaatcatgccactataatgtgtacattttaacctttgactataggtctcaatcttattttggttcctgtatttgaatttatgctaataaagttccacagctaaaaaggattatataaacttatctacatttttgctagtattctggtgtcattttaaattatgtaattaaatcaaattttaatttggattattgttatctgagttaaggatctaaatttttaattttcttataaatattacataattatttctgaaccatatattgactaatctgccctttatatgatgtgcattataagagcttgggattgattcctttgcaaagatgaatgcttgagaagtagatatttaatcataacatttcaaaatctactggataaccttgaattgaaaaatagcctataggttgaaaaactcctgtagtgaagaaagaaataactagtatacagtgacaatataaacattataagtatttattttattatcgccctgaaatttgataatacaaacatgtaatatctacctatcatccatatatcaggtcataaaaaatcaatacattcttcaaaaatttagcataacaagaaatgcactctctctccttgatggaattaagttacaaataaaagtaaaaataagtagataagtgatggaagtagacgtttaaaaacaaagaaaaatatttgttttggataacataaaaactcaattgacgattccaatatttcaagaactttggctgtcaactggtggagttttccccaggagacatttgtcaatgtctagggttattgtggggatgtcaagactggtggaggtgtgaaatttagaggtcaaatgaatcaactagcattgctagggcagcctcccacaacgaagaatcctctggtcctaaaggtaagtagcaccaaggttgagaaaccataatctagaaagtaaacactatgtagctattccaagtgctcaggaaaacacatcaatgccctcgaggggaaaagtgtaaacattttaattgctgtacatggtgacacaaatccatgttgttaatctaagtggaagaggctgaggcacaaaatgtaattcagagtttacttgagccaaaatgaggacagccgcctggaagaaacagacccaagtatccttggatatgaactcccttcggagctttgcaacaagcagtttcttaaaggcaaaaaagggtccagaagtgggatgatgcaaagaggtttgtcacaaattctcattggcttatggaaataacatttattattgactggctatacactgttacactattattgggtgtggattatagtgtctggtgtggcgttattggttaatttatagctactgtggcaacagcaagcagcctagatgaacacacagctcaaagaggagcaggacagaactgctgtctcctttgaatatctctctgggcctgattatttaaaaggacttgcatttctcacatgaaagttattttcttttctcaatgtcaataaatgagaataaatagacataaaataggtcttttcgaggatgaagtaaatggaataaaaaacaaaacacaagctgaacagaaatcatagagggaagaaaaggttataaatatatggagttttcaaagtgattttaagctattaggaatcagttaaatgttgggggattttgtctgagtatgggctaaaggagaatgtcccttttgccttctgaagtttccctgataatcactaataggaggcagataaatagtagaaaaggcaaacaggtttctgcaatgtgtgtacactggagcccttacaatgaagacccagacacacgatgggtgcagaagcttatctaccacatgaagtttacagaaagaatggggtcttggatcacagggaaaaaaaaaaaaaaaaggttatgtgagaaaagtaccctgcctagaaacagtggacttattacgtaagtgaaacctcactgggagcagtcctcagatagaatagacagaaaatgtttctttcagacctttggagacctccgacactcagttaacctttcctagatccagacaagggggcagacctcagagaaagcctggctgcatcaaggcagattctctaccgatgcgaatctccccaagatagctttgcagctaagtttgcatttccagcccttctcaatagccattttgaaatatttcaaggaaatatattttggggtaaaatatattagtttccttcatacagctataaaacatgcaggaataatttttctcaatatctactacaaatccaatatagcagtaattataaaacccaccagatattgaagaaaaaatatgtagagtacatcactcacaaatattgatactaaaatgccaaataaaataaaaataatatccaacaatatttgaaacagtaagacaagaaattggcaaaaaaaataaaacaaatatccaccttggggatgaaagtgtgattccaaatttggtaatccaataatattaatgatatattggttagcccaaataaaaaataaataggggattctcagtacacgctaaaatatatttgttaaaaggtcatattcatgtctttaaagattttaaatgctataaagagtctgatattctatacgcaaacatgtgtatgtccattagaagaacagaggcctgattttcatatgttactacatagaggtagagaagtggatagattaatttgcatatgcatagagaaagcataaaatataaatttactatcatacttaaaggaatataaattcaacataaaataattcaaaggtacaattttaaatatttttaagttacattattaatattagataatatttataattgtgaaaatattcaatgctaaaataagatagaatgtctaaacgtcagtattaaaactagtataaatatttgctggtttttacaaggaaaattcaagctcaacctaaaattatataggaaataaaagaaaaattttaagggagctctttaataacacaaacatatatatatatacacacacacatataacatgcatatatgttatatgggatagatatagatttaacatgttatatctatatttgtatctatctataactacagctgtatgtatctacctttctatatatttactcagtgatataaatatagactggaataaatataaaggcacatatgattcttggataaaaaggatttagtatcataaagacaaattctttccaaattcacctatgaatccacaacaatatacagtttcattagtataatttaaaatttttaaataaattccaagatttatttaaaggaatatacatgtataccagcagtaaagaaagaagtaagagtgcactaaactaacttgctattaaaatacatttttcctaattgaataccttttatttccttctcctgcctgattgctctggccagaacttccaacactatgttgaataggagtggtgagagagggcatccctgtcttgtgccagttttcaaagggaatgcttccagtttttgcccattcagtatgatattggctgtgggtttgtcatagatagctcttattattttgaaatacgtcccatcaatacctaatttattgagagtttttagcatgaagggttgttgaattttgtcaaaggctttttctgcatctattgatataatcatgtggtttttgtctttggcactgtttatatgctggattacatttattgatttgcagatattgaaccagccttgcatcccagggatgaagcccacttgatcatggtgaataagctttttgatgtgctgctggattcgttttgccagtattttattgaggatttttgcatcaatgttcatcaaggatattggtctaaaattctttttttgttgtgtctctgcctggctttggtatcagaatgatgctggcctcgtaaaaagagttagggaggattctctctttttctattgattggaatagtttcagaaagaatggaaccagttcctccttgtacctctggtagaattcggctgtgaatccatctggtcctggactctttttggttggtaagctattgattattcccacaatttcagatcctgttattggtctattcagcgattcaacttcttcctggtttagtcttgggagggtgtatgtgtcgaggaatgtatccatttcttctagattttctagtttatttgcgtagaggtgtttgtagtattctctgatggtagtttgtatttctgtgggattggtggtgatatcccctttgtgattttttattgcatctatttgattcttctctctttttttctttattagtcttgctagcggtctatcaattttgttgaacctttcaaaaaaccagcttctggattcattaattttttgaagggttttttgtgtctctatttccttcagttctgctctgattttaattatttcttgccttctgcttgcttttgaatgtgtttgctcttgcttttctagttcttttaattgtgatgttagggtgtcaattttggatctttcctgctttcttttgtgggcatttagtgctataaatttccctctacatactgctttgaatgcgtcccagagcttctggtatgttgtgtctttgttctcattggtttcaaagaacatctttatttctgccttcatttcgttatgtacccagtagtcattccggagcaggttgttcagtttccatgtagttgagcggttttgagtgagattcttaatcctgagttctagtttgattgcactgtggtctgagagatagtttgttataatttcttttcttttacatttgctgaggagagctttacttccaagtatgtggtcaattttggaataggtgtggtgtggtgctgagaagaatgtataatctgttgatttggggtggagagttctgtagatgtctattaggtccacttggtgcagagctgagttcaattcctgggtatccttgttgactttctgtcttgttgatctctctaacattgacagtggggtgttaaagtctcccattattaatgtgtgggagtctaagtctctttgtaggtcgctcaggacttgctttatcaatcttggtgctcctgtattgggtacatatatatttaggataagtcaaattgtccctgtttgcagacgacatgattgtatatctagaaaaccccattgtctcagcccaaaatctccttagctgataagcaacttcagcaaagtctcaggatacaaaatcaatgtacaaaaatcacaagcattcttatacagcaacaacagacaaacagagagccaaatcatgagtgaactcccattcacaattgcttcaaagagaataaaatacctaggaatccaacttacaagggatgtgaaggacctcttcaaggagaattacaaaccactgctcaaggaaataaaagaggatacaaacaaatggaagaacattcaatgctcatgggtaggaagaatcaatatcatgaaaatggccacactgcccaaggtaatttacagattcaatgccatccccatcaagctaccagtgactttcctcacagaactgggaaaaactactttaaagttcatatggaaccaaaaaagagcccccattgccaagtcaatcctaagccaaaagaacaaagctggaggcatcacagtacctgacttcaaactatactgcaaggctacagtaaccaaaacagcatggtactgctaccaaaacagagatatagatcaatggaacagaacagagccctcagaaataatgctgcatatctacaactatctgatctttgacaaacctgagaaaaacaagcaatggggaagggattccctatttaataaatggtgctgggaaaactggctagccatatgtcgaaagctgaaactggatcccttccttacaccttatacaaaaatcaattcaagatggattaaagacttaaatgttagacctaaaaccataaaaaccctagaagaaaacctaggcattaccattcaggacataggcatgggcaaggacttcatgtctaaaacaccaaaagcaatggcaacaaaagacaaaattgacaaatgggatctaattaaactaaagagcttctgcacagcaaaagaaactgccatcagagtgaacaggcaacctacaaaatgggagaaaattttcgcaacctactcatctgacaaagggctaatatccagcatctacaatgaactcaaacaaatttacaagaaaaaaacaaacaaccccatcaaaaagtgggcgaaggacatggacagacacttctcaaaagaagacatttatgcagccaaaaaacacatgaaaaaatgctcatcatcactggccatgagagaaatgcaaatcaaaaccacaatgagataccatctcacaccagttagaatggcaatcattaaaaagtcaggaaacaacaggtgctggagaggatgtggagaaataggaacacttttacactgttggtgggactgtaaactagttcaaccattgtggaagtcagtgtggcgattcctcagggatctagaactggaaataccatttgacccagccatcccattactgggtacatacccaaaggactataaatcatgctgctataaagacacatgtgcatgtatgtttattgtggcactattcacaatagcaaagacttggaaccaacccaaatgtccaacaatgatacactggattaagaaaatgtggcacatatacaccatggaatactatgcagccataaaaaatgatgagttcgtgtcctttgtagtgacatggatgaaattggaaatcatcattctcagtaaactatcgcaagaacaaaaaaccaaacacagcatattctcactcataggtgggaattgaacaatgagatcacatggacacaggaaggggaatatcacactctggggactgttgtggggtgggggtatgagggagggatagcattgggaggtatacctaatgctagatgacaagttagtgggtgcagcgcaccagcatggcacatgtatacatatgtaactaacctgcacaatgtgcacatataccctaaaacttaaagtataataaaaaaaattaaaaataaaaaaatttaaaaaagaattaaaataagatgttacagaatgtttagtgactagaaatacaatgataatgtccaataaataaatatattttacaaaaaataaaataaaataaaatacatttttaaacttagtaactaaaactgagcagtactgatttggagtaatggaatttaggtatatgagatctcaaaagcatagagctcaaaggagacccctgtatgcatgagagcttaggatgtgctttagaaggcattaccaaaccacgggcaaagttactttggtttcttagtcttactaggtttgaaaagccagagaaaagactcaaggccaccatataagagcaaaacaaaaggacagggagagaatgtgaagatactgaaacattttacataaagttgtataaaacatactttaaagaaaatgtaaagtttaggatatacatcaaaatcagcagaaccactaaataaataaataggaattgtaaaaaagcaagagaaaatttaaatggatttctaaaaaatattgacacctatgatttttaaaatatgtttaagatatcccatatttcacagggcagcctttcacaacatatattaggacataaaggtccttctgtttttaatttactagtgtttatagggttacaaatgtcttctacccttgtcttttgtctgatggtgcaaaaaaattttcataagcatgtacttttgaatgcctgatggattgacatatataatatgctgctagtattaaaatatatgacggaaaacgcatgcaatcttctcactgtttacataaattctaggtttctcctatttacctcaagcacgtatggagcgaattcttaccttttaatattgccatggcattcacattgaacgtaagttgaactctcttatatggtagctgggttcagattcccttgacaatttccagttctaaccctcacagttcctcagtgtggctggcccagatattgatcctacacagctgcctcctcctggtgactagccactgtggaaccattggatacaacctacctgactcaccccacagacctcacagcccacttggacagcccccacaagccagagtgacctgctcagttgcagctgcagccaagaaatgtgcctgctggcactcaccccactgaccagagccccgtggaaaacttatttgggtaatgttctgggcccaataaaggctggagtcccacagaccccttttctgtctcttgctccccactcatcttccccattttcttcagccctacgagttgtgctactgtattagtccattttcacactgccagtaaagacatgcccaagactgggtaatttccagaacaaagaggtttaatagacgcacagttctacatggctgggtaggcctcacaatcatggtggaaggtgaaaggtacatctcacgtggcagcagacaagacaagagagcttgtgcagggaaactcccctttataaaaccatcagatcttgtgagacttattcactatcaaaagaacagcatgggaaagacctgcccccatgattcaatttcctcccacctgttccctcccacaacatgtgggaattcaagatgagatttggctggggacacagctaaaccctcttctcagctaccctcttctctctggatctgtgagtaataaaactacttctgtgatttcccatgttttgtcctgtggcctgcatgtgtctgatctgacctacactggaacctaactctcctcctggccagggtatctaggagtggctcttgtcagaaatacacaggacacaggtcaggcaatagccaccaggcatctcctagtctcaacagatgttctgtgagagggaggcctggttgtgggatgcacacctggccactgctggggtaaggaagtgccctgtgaaaggcacatgttaagcatccacaaccccctgctcagaacccaagaaaggcagggctccaattgacagtcactctccagagacaaacctcaagccctaactggaggaaaataaaacaatgtaaaaatttgaatttatcttactatttcaatgatccagtaaagacattctatgcctgtacaccacatattttcttcgattgtggatatattttaggtagaattttatgtctggctttcactttagcctggtccctacctcaagcataaggtaaagattttccatagtttcttttctggtactactgcctgccagtgtggggtcatgtcctagtctatcttgagggaacccccttattcattattgtcagagtgagactgttaagtcttgatttccctggacaacttcattgcatgacttttaatatgatttttaaatataccctttactggacaataaattatatagttatctgagtaagagatatgatcagaaagaggcattgcctcattcagcttttctgtttggtgaactcgcatatgttctcctcacccaccagtcacctctaaactgtattgttccaagacaacaaacagaactcgagtgtgtatctttcaccactggatttgtctttgctccataaagcttaatgcttaatagggtttctgttagcattttctctatttattttcccataaaatatcacaggccttcttcatatggaattatgggtgatttccttcaatctgcatcatatcaagttgaggttcatgttgatggaaagtaaaacatacgtttaaaatatcagtaatgatgttttcccctcctttttagcacatgtgcttgtgagagtcatcgtaatacaattctagtctcatgctttgatcattcctaagatgaaaataatatttttagataaaatatctgagttttatgaggcctttagtatatgatgtaatagaatatcagaaaaccatacttttttctagttttccatgtaattctttcattgtttcacctttactcctacgacagtaattttccaaaacaggtatcttgtcattcctcctgttgttatcagtaaataagtgaaatgaagagctagattatgtaatttatctagaacaagaaagtagaattgaatctatattcattaatgagactaaccagtcaattacacagataggctttttacattttgaagatcatatggacccattgtcagatatattattatttatgtctatatggacatcacctgtgcctatttatgtagaactcaatgacagctgatttttatttttattatatatattttttgagatagggtcttgctttgttgcccaggctggagtgcagtggtgcaatcactgctcactgcagcctcaaactcccaagctcaagcaatccttccaccttggcctcccaaatagctaggacaacaggtgcacatcaccatgcccaccttttttttttttaacttttgatagaggctgggtcttgctatgttgcccaggttgctcttgaactcctgggctcaaagaatcctctcatttcagcctcttcaatggctggtattacaagcatgagccaccatatgggctggaagctgatttttaaaatactgacatcatatagataacagcacctgaaaaatagacaacacctagctttatgttaaaaagtgtgagggtatcaatattgttgtggctattggggaggaaaacattagtaaaaccagtgagttaaagctgttgctttaaactttggctttagtttaacaaatgttctctggggtgacagtatgtacgtaaccatgctatgcccattcacagatgcagtagacggaagaatttctcaaagacaactgttctaagattgaaattaaaccgcactgggtatgaaaagagaaagtccaggaattagcaaatattttagatatcagataaaagagaatgccaggtatgcgatgataatcagcaatggttgttcacagaatacatcaaatcagtatttgaattagcttttgaattataaggacaaatggatcaagtcttgactctttagtagataaatcttattaggctgagatgtgttttcccctgtttttccacaaggagattacaaatttgcaaacctcagctgctctcattttatgctgtcaccaagccaaaagctgaagctcataaatcagtgtgtctaagtgttcactagttatatacctttttgtagtttaagctatctttccaacttcctaaatcatcaccttcatttgaccttgtttttttccactatcacttctttattgactacataaagaatataagttcttattttgttattgttcattttagtctaatttcatcaaaatatcataatcctttaatttccttttaatttcaaagattaaatgaaacctacatagaaatgagtgtaagatttgcatttgcgttattttggtattaatttgctatcctccctcatacacatagtgatcacttccatgtacgtgatttcaaacatccaagtgcagtattaaaagcagttgtaaattatggttctgattttcatgatacaattactatataaatttcctcttgctgctgtaaccagttaccacaaacttcatatcttacaataaagtgactggtaatcctacagtactggagctcagaagccttaaatgagactcacagggctaacatcaagttttgggcagggctgcagtctttctgagggctctgtggcagaatctatatacttgatttttttcagcatccagcggccacctttattccttggaacatgacctcattcttatatcttttatttttttttgagatggagtctccttctgtcgcccaggctggagtgcattggcatgatctcagctcactgcaacctctgcctcccgggttcaagcgattctcctgcttcagcttcctgagtagcttggactacaggcatgtgccaccatgcccagttaattttttgtatttttagtagggatggggtttcaccatgttagccaggatggtctcgatctcctgacctcgtgatccacccaccccggcctcccaaagtgctgggattaggcgtgagccaccgcactgggtcctcattcttgtatcttaaaagtcagtgatgttgagtaatttctcatgccaccacctccatggttgcctttcttctgccttcttctttcacttataaggaatcttgtgatttcattgatcccacccaattaagataatctctccatcattttattgcaaccttaatttcacttgaaatctaatttcccactgccatgcaacctaacatatttgtatgttagactctgggaattaggacatgaacatttttgggaggccattcttttgtctacaccagacataatctatttacctgcagattaaagtgttctttatttttctgcctccctctcttaattttttaaagtaatatgaattgtagtaaagagaaagaaagaaaagaaaagaaagaaaaaagaagcaaggaaagaaggaaggaaggaaagaaagaaagaagaaagaaaagaaggaggaaatgagaaaaggaagggagggaggaagggacaaaggcaggaagggagaaaaaagaaagcaagacatggctttccaaaaccttgtgcattccaaaggtcttcaggactggccctcgacaagctcctgggagatgataacctatgagcccttggtatatgctgcctgatgagagtctttgtatacctgaaaacgtaggtcctaccaaatagctgatgctaacaacgtgatttcttgtgagcacctgtttctgtatgcctatgactttgtgtaatgccatactaatatgacctctcttagggcatagggaggttgggaactaagtagctaagttcagtcacaggacgctcgatgcatatgtggtggaatcctaatgaaaaccctggactcaagactgactgagcttccctagttggcaacaagttcacacatgttgtctcacaccattgtaaagaaaattagtcagtgtgaagtccccactatgaaaggacacctgtaagctcacatctggtttgtcctggactcaactttatgtgcttttatgcttctgattattttaatctggtttctttcactgttagaaactataaccacaaaaaaaatcagctttcttgagttatgtgaatcattaaaccaaagggggacttggggacccccagtaaaaagtatatacattcttaaaaagaaacagaaaactggccacagcagatattgttgatgacttgtcttctatctcctggactcaatgtgttcacctgaaattcacctgtttccaactaactgagagctccccacatcatgcctgtctttctgatttttgggcctgcctgcaagcttcttgaggctaaccagtgcttctcaaccacacataggaacaaagaaggagttaggggtggagagttaatgattctaaggcaatccttaagcaataagagatggggattccagcatccccatctctttgtaaagttattttgagacaatctccatacctccatcattactgagcacaatagcagtaactactcattcacactggcttcgtgttctgtttcattttctccacttctgtgctttctcactcaatttctgattaaagtatctgacccaagatatttgtttcatcatctatttttgagggaatccagagccaagacaataacaatgggagctttgcaatgagggaggctgagtataatcatcagaagagtacctacctcactgggaacatgaaggcctggagagcttgctgtttcaatgagagaaaaatgttgaatctcagttgaatacctatatatatatgggcaataagtcgtgctctttacttatatcaaaggaaaatgctctttacctctctttgttgttgtgtttttatcactattgcctacacaagcagaatatcatacccaggatttaaagccctgtctgcaggattttcaagctcatgtttttatcataagtcactgtgcttccatgtgttttaaatctaatcctcattcctctgcttttacaccagagaattcatcactgacttatttttgactgaccttatagagctgtcaagtacacaatttctgctgtgacctttctcttagagttcagtcatatagcctctccctagatatcatctcctcttatctttcataataatgaattgtcagttaaaactcaacatttttaagattgagcttaccatctacacacaccattattggtgtattctcatagccttgaaacactaatgtcacgttgatgtctgccttttctttctctgctacctcatccctcatccttagattattctaaaagattcaattagatcaagttggctaattatatttttaagatcctctctacccttaccaattttttgtttaacaaattttaaaaatttctggcaggagactgtggaaatccccatggatgactgtggttttactattttacctttcagttttaataggttttatattatgtattttgaagtaatgctattgtatgcatacatatttattatttacatgtcttcttggagtattttcccctttgtcattatgaaatgttattcttcatccccagtgatatttcctgttctgatgtctactttgctcatcacagttttagtgggttttggtttgtttgtttttctttttttttttcggttcaaataagtttcttataaagagcatatagttgagtcagtgtttttaatcctgtcttatgatctctgccttttaataagaatattttgtcaatttatatttaatgtaattatcaatatgattgggtgtgtaactactctcttgctatatgttttctaaatatctcatcatttctgttcattttccccctttttctgccttcttttgaattgagaatttagtttttaagatccgcttttatctccactattaacttttaaccgttccattttgttttaattttaatgattgatatagggctcataaaatagacagttcttgttttccttagttttgatatgcaaaggctttagttatcatgctttagttacatagcacaagccccaaaacaaaacagtttaggtacagcagtgtattaattgggactaacagattgaagtataatttttttctgttaactcttcagtccataaaactattaagtaaatatcagatttgcatcaagatccatgatcagtcatgtcacttttctcaatatctatcaataatcaattactatgtatctgttttgtattcatacagagacaggaaagcatccagtagtgttgcttctttgtctttcagtgataaaggcatgacattatacaaaaattgataaacgacagaaaatcagccaacaaaaatgaaagtgtggcaaataaatgaaagtgtcaacaccgaaagtgaaattcagattggatcttgatggatttatagaagaaatagttaattgcgagaatgctgacacaactaccatccaaaagatttcatatgtgcagtcaggggaacttacagaagacatatttacaacttaaatgaagaagctgattgcagggaaaagacaaaagttttcccagaagatgtgatgctgagaaaaaaaattacattgaagaaattctccaagatgtttaaagacaatgaacgcacaaacaataaaatgttggacaaataatcgaatttataaagaagtatggcaattcaccaaagcataaaaaatattgagagtcacatgatgagaagttgtgcaaatactgtacaaactactctgaatacatttcaaagaaatatataaaacatgtattttaattatcaatgttttaaattatagtgtactatataaatactagttttagggttgttttttggtttttacttttctatgcatatataaccaacagtaagacatttttaatattttgacaaatgtgtttatttatttattcttttatttagagacaagatctcactctgttgtccaggctggagtgcagtggtatcaaaaaggctcactgtagcctcgaccaccaggctgaggtgatcctcccacctcagcttcctggatagctgggactatatgtacgtatcaccactcctggctaattttttgtagtttttgtagagacagggttccgtcatgttgcccaaactggtctcaaactcctgggctcaagtgatctgcccaccttggcctcccaaagtgctggaattaccggtgtgatgtcactgcacctgactgacaagtgtttttaatgattgcaggaacaagtttatgtttttccattaattattaagataactttgcccagtttcaacttgcacagtggttactaaggccccccactgatgtgcataaagagtaccatctgtacatttttttaacttaaaacactcaaccttcaaataatatttataatacctgctatatagttttaaaatattgcaattctgaagccagcattaccatgatactaaaacccagcaacctataatcctgaaatgtaagacctcaaactatgagaatcctagaagtaatgctaggaaacaccattctgaaaatcagccttgggaaagaatttatgactaagtcctcgaaagcaatttcaacaaaacaaaaatcgacacgtgggacctaattaaactaaagagcttctgcacagtaaaagaaactatcaacagcataagcaaacaccccacagcatgggcgaaaatattcacaaacaatgtgttcaataaaagtctcatatctggaatctataaggaacttaaacaattaaacaagcaaaaaacaaataacttaattttaaaaatgagcaaaaccatgaacagatacttctcaaaagaaggcatacaagtggctaataaacatgaaaaaatgctcgtaatcactaatctcagagaaatgtaaatcaaaaccgagatgagatatcatctcacactagccagaatggctattaataaaaactccaaaaacgtttaatgatattttttattgaaaagttcctgctaaggctagagaagaaggggaatgtttatacactgttggtgggaaggtaaattagttcagccaatggggaaagtagtttggagatttctcaaagagcttaaaacagaacgaccatttgacttaataatcccatttctggttatatatccataagaaaataaactattctaccaaaaagacacatgcacttgtatgttcattgtagcactgttcccaatagcaaagatatggaatcaacctaagtgcccatcggcagtggattggataaagagaatatggtacatatacactatggaataccacacagccataataaagaacaaaaccatctatttgcagcaacatggatgcaacttgcagccattatcttaagtgaattaatgcagaaacaaaatcaaataccacatgttctcacgtgtaaatgggagttaaacacggggtactcatggacataaaaacgtcaacaatagaaactggacgctgctagagggagaggaagggaaggagggaggccggggttgaaaaactgtctgttaggtactatgctcagtacctgggagatgggctcaaccgtaccaccaacctcagcatcacgcaatatatccatgtaacaaacctgtacatgtattccataaatttaaaataaatgttcaaataaaaaaacaaatattataactgtctatccattttctctctacagttctttgccctactgtcatagggttttcctcctttctttatatatattttgaatgccacagaaataattgttattttggttttaaataatccattacctttaacattacttaaaacatgaaaaaacgtcttttgtatgtattgtttctttttccatttttttttttttttgagacggagtcttgctctgttgcccaggctggagtgcagtggtgtgatcatggctcactgcgacctccacttcctgggttcaagcgattctcctgcctcagcctcccgagtagctgggattagaggcgcacgccaccacacccagctaatttttgtatttttagtagagacagggtttgaccatgttggtcaggctggtctccaacttctgaccttgtgatctgcccaccttggactcccaaagtgctgaaattacaggtgtgagccaccatgcacagccctatgtattatttctaacatgagtcatttctttttaaaaatgtaaattatcccagcaccatttattaaataggaatcctttcccccatgtccaacaatgatagaccggattaagaaaatgtggcacatagacaccatggaatactatgcagccataaaaaacgatgagttcatgtcctttatagggacatggatgaagctggaaaccatcattctcagcaaactgtcacaaggacaaaaaaccaaacactgcatgttctcactcataggtgggaattgaacaatgagaacacatggacacaggaaggggaacatcacacaccggggcctgttgtggggtggggggaggggggaggggggagggatagcattaggagatatacctaatgttaaatgatgagttaatgggtgcagcacagcaacatggcacatgtatacatatgtaacaaacctgcaagttgtgcacatgtaccctaaaacttaaagtataataataaaaaaagtaaattttcatcctgttactttctttttgtctaccatttctgtcagtaccagtatgctgttgataaaatctatcagctacttattgtcaaaatagctttatttgctttcatttttgtaaatttcttgatttttttagaattttcacatgaatgaatttccaggttgacttgtttctcttgctttaagtaatagaatgttgcgctactgtcttctgatatacatgcttatcataaaaagtagttattacattggttccattgtcaataatacatctctttttctccaactgtttttaagttttctttttagaaacaactttcttcaacttaatctttttattcattttgctttgattccactgcgcttcttttacctgttggtttatagttttaccaagttttaaaaatatctcaaccactgcctttacaaatagtttttgccctccccccatttcctgggatttcaattatgtgtgttgttaagctgcttaatattttctaatcccataatttctgtcttttcttggtctgtttctgttaatttttttttcttgttttggatgaatttttttgtttatatgcatttctgttatttttttaatgtctaagggaaattctgaattctacattgttaggatctggatttcgttttatttaaagagagatgaactttgttttcaaatgcagttatctgagatcagtggtgatattgtttacttttaaatgtgattataatggcttcagagccttgactctagagctgattcacccctctactaaggtgtgattattctgagaactctatctgatgttataagtttctcactctggctggagcacatactggttcttctaaggcccatatgacctccaggaatttctctggcccattgctaatgaagactcatttttctatctcatggagttttactttatgtaggcacagttcggttctcactcaaggactccagagaacctctacgtaaatctccacagttctctctctgtgcagccctcttctctctgtcagtctgccttgatgattctagtcaccttggcctccataaactttgatatcttgctcttaaattcagcaaatcatgatattctctctcggattgtctcataccatgctggaggctggaaatcactttcagtaagtatgctggcactataaagggtatatattgttttctttctctgagaaatcacagttttgtgctgcctatttttttcatgcaatgaaaacagtttatatacttgctctggatttctaaacgtttacaaaagttgcataattctggtaatcattaattcttcatcagcaacagttgaattctcagagacttgtttaactgcccagatgacaattatcctattgctttattcttcaaatctagtaagtgaatcaaagtcagtcttagtgatgatcagtatctctatatttttgtctaaaaaacagaatgctattttaatctatagattcaagtgtcattttatctctttgaagttttcaacaagtaatgtttccaatgttaatgttctttcttattcttcaaaacatcaagtaggcagaggttgagtctccattgtcatgcatctatatttaccaacaccatattaaggatttttattatgcctttgtcttttcatataatttacttttgtatggtttcttctagatattcactatttttctggatgtaattgctgatgtatatagtgcctatgtatttcttacataattccttagttgttcacttcaatttctaaatggagattaagttaacttcaatttgttctctgattactttggtaattctacttgtgatgtagttttagtaactgcatcttgtttatgctttttgttcattttcatatttagaaaatagaacaccaggcatatatattttactgatttttttctctctgcattcctcatagaacagatccagtattagctaagggatcctctggggcaggagtggggtggcattgcagtttgtatctttttttaaatccatgtttttgtaatggaataccatcacactaattttcttactccctaagtactggataattgtttctcctcctatcagcattcacttttctaaaggtaatgtggctcagatttagattcctaggtttctaaatcttcatttctaatctctatattatcacatgctggttaattcttttctcttttgctcttttccacttctgtgagcttcattctgtttggaactcagagtatatgaaatgaacagagtacatcagcctgaattctcttacaacttcaaattctttccattttatggttagacaacactgagttactctatagtgactttcctacttttattaatatcatggtcacattattccataaaatctaacaattttaagaaaaatagtttttgagttacatctcccagagtagcggcaatgatatctggaaaaaatgaccatcctgaacatgtactgattatacatgtgaaagcactcactctgatcactccttgtttttgttgaaatataacagtatttggaaggtttgcttctcagtttttggtttcgggctatagttgtttctctgaagatgcttatcttcttattttttcttgttttctttttgtcctcaatgaaatgaattttaatagaagaatgaaatgtaaaatattcaaattcagggtcttacagtgtctatagttttgggcactcattttaaaactgaataacaattttcaatgcatatgactcattctctaccctcctttcttccattcttctgaatgtgtgacaaaaaagtatagatggtctgaatggtaataaattaaaaaatcatttcatgatggtcctattcctgtaattctattttccaattgacctccacttcctatcttaactgcataaaagtgaaataaatcagtgactatttaattttaaaaataagtggtctgaatgattttgctgggataagtaataaaaaatgttgaaatctttgagattttcaatttgcttaaaaagaaaaaagtctcaggctttggcaaagcaaacatgcattttgctaagtaatattcccccttaattttgagatttattttggcttcatacatttctttcttatatgaataccattaaagtaaaagttatttcagagttatcaggtggaagacttttatagatgtatgtgcatgcatattttttttttcttaaaaatatagttgttttagtttgggctgccagagcaaagtaccatagactaggcactttgtaagctggatgggtttataaacaacagaaatttatttctcacagaccttgaattcagaaatatgagattagagtgccagcatggatgaattcttgtgaggaccctcttctgacttgcagactgccgtcttttctttacatcctcacacaatagaaaaagagcaagagagttctctggggtcttttttataagggtgctaatctcattcacatgggctccagtctcatgatgtaattagctcccaaagaccccacctcctagtaccatacattgtgggttaggattttgacatatgaatttgggtgggggggagaaaaacaaccatttaatccattgcaatagtgaaggtggaggagatacaaaatgaaataagtaaatcttccataaatctttcataaattatagtataagaaaatatcatgaatggttcaaatttgtgatttttatcactacaaaagagattatgagactgtgatatggtctggctgtgtccccacccaaagctcaccttgaattgtaataatcccaatatgtcaagggcagggccaggtggagataattgaatcatgggggcggtctcccccatactgttctcatgttaattaataagcctctgttggtttcataatgggagttctcctgcacaaactcttttgcctgctgccatctaagacatgcctttgctcctcctttgctttctgccatgattgtgaggcctccccagccatgtgaaactgtgagtccactaaatcacttgttctttataaatgacccagtcaagtatgtctttatttgcatgaaaacagactaacacagactgattcatccagctcagaaatatttgaatagggcttctaaaaagggccttgcaaagtatgtattatgtgtattgatgaagatggatggagttttcatgaaagttacctgtaaatacacggaccagccaaggtgaataaagaaagaaagaaaatgagcagagatggacagaatagaagccaaacacgactcatttatttacttctctttaaagtgccaaagcacatattaaattttttttttaactggagtctcactctgtcacccaggctgcagtgcagtggtgcaatctaggctcactgcaacctccacctccccagttcaagcaattctcctgcctcagcctcccaagtagctggcaccagccaccacacctggttacatttttttgtatttttagtaaagacggggttttaccatattggccatgctggtcttgaactcctgaccttatgatctgcctgccttggcctcccaaagtgttggaattacgggcatgagccaccatgcccagccacataattaatttttatcacagatttcacagattttaaactcctcaagttacatttctcaagtagtaaaatcacttatttctgagtgcatttaagatggaccttgagtttatttaaaatgcagattcccaggtcctgttgtatgcctgttaaatcagaatctctggacttggaactaactgagaagtttgcactttaagcaaaaatcctggcgaattctacagactaaggctttaaagccattcatctgacatgtggagtacaatctctttagttatctttagtgaatatcctctataatattcacaaagattgtaagtaaatagttaaatgtatcaatgttaagacttcaacaatttaagaaatgttcccaaatgcagctggttttcttacaaaatgggaggtatagttgagtgtatgtattggaaaataaggactaaaactctctttaaggataataccaaaggtaattttcttaatccctacttttaaaaatattacattggctttggtcttcttgttgaacggttaataatttgaccgataaatctataaattcttgttaagaacttactataatcttagctacataaaggtgatacaaaaggaagggaactatatagtgcctgaaatttgacctaagagttatgaagagtttgagaaaacaagagaaaatatgaaagattatcatagaacagaaggtaattgcatggtattaattttaaatgctgccactatgcacaggctaagaagaacaaagaaggtttttgttgtaaagtcaggtttcaggaagtgatttggctaagatgtggacctaaaagctgggtaatatcacttacagaaaataccattacagaaaataccgaaatagtcactatccacaatttagaagaaaaaaacctaaagttatcctttgtcccatgataatcaagcagttgtcatttagctcctttcaaggtaacaagggatttcatagaatattatacttcaatagcacttcatcaaaatttcatttacagtaaatctaattatctcatttctttttttttgagacagagtctcgctctttcacccaggccggaatgcagtggcgcgatctccgctcactgcaagctccgcctcctgggttcacaccattctcctgcctcagccccccgagtagctgggactacaggattatctcatttcttacaaaagttacccatggtgctgagaaaactagaaactggactttagatgatgcttggtattgttcctatttatttttaaaacttgatatttcttcagagagtaaactttgactgttatattatgacaacatgtcgggtatcatcaatttgaattttgttagattcatttttttttttttagaaccccaagataaattgctcagtttttatgcttagtttaaatttgagagccttaatataacttgtacaatttagtttcactgtatgttttgttattatttgggaggtgaggagagttcatttgcagtacaattttagcatattttataatatagtcagtcaaaaaaacgcttcacatgtatatatttcttctttattttagactgtaggttatgtattttaaaaccaattgttagatgtcctgttatacagatttacttcttcctatttggtgattttttgatgcattaaaaagagaaaattgtataaacctaatgactattgacaagtgttcagagagataaaaaagatctataattagcacaatggaaagacttccaaatccacactcttttgacgttttctcacctgaaaagtatttattgcagttttactggttgattggttttcattttcctttcagttgtgtttctatgcagaaattgcatggaactgaacaggaactgcattacaattgaaactgtttctaatattattcactaatgggcaaatccattactttaggtccatttcttatacaaggaaatgcagttactccgaggacaattcaggtaaataactaccgcagcatggacccaagggtagcagtagaaagtggtgctgctctaagtttctcctctagtggatgccaaaagaaaacattcttatcactgtgtacgtgctaggcataattgttttggtatgtgttcagcacaggcttagacaaaagtctttctatgtaaatccaaacagtaactgttgaattactcatttaaacgtacgtgtttcacagcacaagttgttagtgaaaggtttcaacttcttattttagacattaaacagatacctcaaatgtttgggaattcttcctttacatctcagcaatggaaatatttagctttttttttttttttttttttttttttagctagccaagagtccctgtacagtgagcaatcttttggggtcttatcttctcatcactgaagaatttatatgtggacactaaagtaatattaaaaccactcactcttactggtaatttacagaatacagttttaattaacagcaatatcgacaacaatagcaatgatgaaacctctgaggtgaaagagaatgttaattttagcaaagagtgtcttgtcatctggacaaggcttaccagttcctagcctctagtttgtatacacttatgcaatcattttgaatatttactccctgtatgctggtagaaaaataagtgtcaggacattacatgtgaaggaataattcaacatttaagtttttaagagtatattcttttcagatcttgttccccaaagttaaacattgtggtagattgagactttcattattaaatatcttacagaaaacaaaggaaatcataacgtcttatttaccatcattaagagaaacctgaaggccaattacttattgagtggcaggcaactcaattacattattgtatagaatcctcaggactgtattaaaaaattatgacaaggagtttacacaggtcagcctataaaactactgcataatttctatctgtaaattaaaatagaaaagaaataagattgaagtaaatatgataatagtaaatttcatgtctaagtgtgctaaactacctggcctttcctattcttgaataaaattattctggttgccataatgcatcccgaagcttacctagatgaggagaaattcgaagtattccaatgtctgcactcatgaatagatcaagacttgggggaaaccagtgatctcttggcaacaggaccagaaggtacgtaatctcttgttttgattatatttcatctgctgaaaaattgcttatctctctgagatttatcttagagataactgaaagtaattttgtgaccttcacattgtccgtatttaagttagataattgaaaatttagtgaggatcccaaaacctcaagtatgtatggagattaagatttccaactctgaagaaaaactgtcaggttcaaatcttggtcctgttcacctctgatgactaactctgtggttacaaaaccctcttgcctccctttatccatctgagaaaaaaattggtatgactacatagtttggcaagtgggggctaactgagctactagacaacttacacagtaagtcgacacaaagcacatgcacaataagcataattaatattacattattttattttgtatgaggtggcaacaaatagttatcacatgcttaattttaaataagcattaatagtggtagaaattaaggaaatttatatattagagaaaactcttagaaatatgaaggctatctagttatatttgtttcttatgtatcacatcctcaattttaaataaaaagcattaataatagtagaaattaagaaaatacatttattagagaagtctattagaaatatcaaggcctaatctaattatatttgttaactgaacttgagacatatgaatattcacatactttaagatattttatcacttatttgaagagggactctggtcactataagaacaactcgcacatagcaaaaactagtgattgaatacattctaaagagtaacatacattttgaaagtgagctgttgttggctgggcacggtggctcacacctataatcccagcactttgggaggctgaggcgggtggatcacgaggtcaggagattgagaccatcctggctaacatgatgaaaccccgtctctactaaaaaaaatacaaaaaattagccaggcatggtggcggacgcctgtagtcccagctactcgggaggctgaggcaggagaatggtgtgaacccggaaggtggagcttgcagtgagctgagatctcgccagtgcactccagcctgggggacagagcgagactctgtctcaaaaaagaaaaaaaaaaaatgagctgtagttattgaactttttattattacttaattacaagaaaaaaacaaagtaaacaaccaaaaaaattatagtgttgagaaaatgccaaggctgctcacccacttctttaaccattcttcaaaaaagtgagctgttgttattgaactttttattattacttaattacaagaaaaaacaaagtaaacaaccaaaaaaaatatagtgttgagaaaatgccaaggctgttcacccacttctttaaccattcttcaaatttaccatatatatatttttttgactaagtgagataaatcacattgaaatgcatgaaataatgtctggcatccagtagatgctcagtgacatttgtcccctttaatggtttcaactggttaggatttcccacgaagaacagtagcattttggtatcactaggctaatgtccattttctgtattggagagtagagaaaccccttgggtgatagcttattttacctactatggaatttttacagaacaaagttaagggtcatctgctgtgtggattcccactggttatgtgagacgtggcagaacataatggtgagaagaaggattcaggagctgaaccatctgggttcttcaggctgtatcacctactgccaatgagaggtttagccagttagttacctttgtgagcttcctctggtgaggatcagaagagttaatacataaggcaccaattataatactaaccctgggatgtaaaaaggctcaattattattactggttaccattattattaagagtgttaataataattactacagcaatcttttctagacaagggaaagtgaagcaactaattaaccctcaatgaaaaaaaggtttttttcactgctaaagactattaactctgacatgagttttagaatagttttgctttctctctctttgcctgtattttctttattttttattctaatgtttttgatttacccaaggattttggtgctagattgtggttctggtaggctgatcaaagttcataccacaggcagttaattttacccagatgactcctggtttctttcttttttaaataaatcatatccactgccgaggttgatatgaggacttctctccattggcaagtagcattgtagccacaatctcttattaaagcttgaaacaaaatggtgattactagtgtttatggccaaattttgttcatgcctgaccactgaatttgtttggataccaggaaattatggactgtgtgattcgaattaggataagagattaaaccctggtagccattctttagcaaagactgtgctgttaaaaaaaatggaaaatatctttttaaccaagtcagtgaaattagcttagtcatgaggattgcaagtgagctttctgtacttgagatgtaaacacagtgccaaaaagtttcaccaggagactggggagagatgctgattcttattatgtgagagatttgtaatgctaacttaatcttctgactaaaccccttaatttcccatttttaactattctagatgcttgtctcaggaaatggaagaaatctcttcaataatgttaccagagacatgccatgtcatttctatcttctcaatacaactacttagtttcttttttctttcatttttgcataatttccatagcaacatgtacatggtgactacattacatcaatcagcacctccactcctggtcccagttttttctttgctaatcctcactgctgacttttgttgtggtgtcattatcatttcacaaggtaactactgtcaccttggaaatgaaatgcatggtcaaagccctttaatacacaaaatatgtaaaatctcctcttatgcatattatacatgaaagaaggataagaccatcagttagttgtgtctcctctgtagaaatagccagagcatcaggacagctgcatcctctttcacagaagtaggagagcagatgctgaggcaggacacaatagttcttcagcctgtgttgcctccacttgcatcctagagcacttgttgaactctctcttaggtaaatggtaatattttctgaaggcactaagagaatttttaccatgagggtaaataccaattagctattatctccttttagtaggagtgtagcacaaagaacttctgattgactgcttttcaggggcagggataatttgtttgtttgcttgtttatgtatttatttatgattttagtcagattgcattctaagacttcagcaagatttcaacgaacattttcctattttttctttttctttctttcttttttttttgagacagagtctggctctgtcgcccaggctggagtgcagtggtgcgacctcggctcactgcaagctccacctcccaggttcacgccattctcctgcctcagcctcccgagtagctgggactacaggtgcccgccaccacgcctggctaattttttgtatttttttttttttttaagtagagatggggtttcaccttgttggccaggatggtctcaatctcctgaccttgtgatctgcccacctcggcctcccaaacattttcctatttaagccttgccactgaaaattttctgtctttaagtcccacataacaactgcagcctgtaacatcttgttgactggcttgacagaggatggccaatttttgtgtttaggctcagatgtgcagtgctgggttctcaaattgtgtcccagcctgggacactgtggctttaatgacatcctcattatccatcctttatataaaaaaccttatatctgtatgcaaagccatggactcttaagattttgagtgcatcatacatgctacaggcagcagaagctatatgaaggatgtgctttcaggccaatccctgcctagtgtaggcccaggtggtataatgcctcataacagaccccattccctgggcaaagacattgtgaatggtgggatcagtatcctcctgtgacatgtgacatcctcctgtgacctactcactatgatttggatggctcccctcaagtttgggctagagtgtcagtgagtggattaactcaggacaattccagttctttctatgtaccttcctttcatcatgagggatatgaagaaaacattagatcatgttggatgctgtttgtctgttggttggttggttggttgggtttaacaataagagcacgtatctagtcttctagttttgtaaggctgccataataatttacatccaagctggtgacttaaaacaacagatatttattctctcatagttgtagaaaccagaaatttggaatcaaagtgtcagaggaccatgttccttccaaaagccctagggaaaaattttaattcttccttgcctcttctagcttttggtggccccaggcattccttggctgatggcagcataactccagtctctacttttgtcttcatatgtcattattccctatatttctttgtattctccttttgtgtctcttataaggacactcattggtggatttcatgcttatctcaatccagcatgacctcaaattgagatgctaaccttaattacatctacaaagattcttatgccaaataaagttacattctgagcttccagttgaacatatctttggagatccactgttgaacctactatgcctaaaaactcaggcctgtcccaagggcagatttaaaaagaaagagaaattcattttgctttctgattttgagattgttcctcttacccctactccattttcaacacctgaactttatcaagaaaactcaaagacaaaatgtggccaaggttggcaataaatacatttttgccaataatctgatgggaaacttatgttacttcttgtaaatcaaaataaattggatctgctggcaatctggttaacctgcaatttagattatgacaatggtgttcttattttatgcattttcacatgctccaaatctccttctgtatctctttctaaaattttgctgagagtccatcctttctgaccaaaggttatttcattctccactgaagtagttattaaaaatatcttctggtagataaggaaaaagtggctcatgtataccactggaattctacacagccataaaaaagaaccaaattaggttatttgcagcaaaatggatgcatatggaggccattatcctaagcaagataacatggaaacagaaccaaatactgcatgttctcacttataagcaggagctaactattgtgtattcatggtcataatggtggaaaggatagtcactggggactactagaggatggaaagagggtgagaggcaagggccaaaaaactattttttggatcttatgcccactacctcggtgaaagattgattcatactctaaacctcaacatcactcaatatacctttgcagctaacctgcatgcatacccccaattctaaaataaaagttgaaaaaaaaagcttagaaaagaattgaaggaaatacaaaaataagttaccacgaccacctcttgatggtgagtatgggtaatttttgttggtttatattgaccccctatttagcaaaattcctgaaatgatcacattaatgggaaaatatagttttcagttcctagaaaggtttgcttggtttatgtttaaaaacaaatgattcaacggctcttttcacagacttgatggtgatttgggagaaaatccagaaattggtgacctattatgagttcataattaggcccattatttctgataaaatatttcagtagcattaaaatgctaagctgaactaagatgttcatgaaatgtattcaaataaacaaacccaatttaaagatgattgtataaaaatatcttacttgataatataaatgcaaaatttgtgaatgtttatttatagttcctgtaatttggggaaattaaagtcacttgggaacaatatttacttcactagcaaccaaaggagtacaattgaaaaataatgacttgaaaataaaataaaagtaaaaaaggacttcatttcttttcacacagtctgaaagagtgagtgcacaagcttttctctgcccaactcctctttgtccacaaggaattttcagaattcctccgtgtctgtcttataatttcattccttgctcatataagcaagttggttcagaaaccctaagactgttataccgtcagttgggttagtttaaaataacccctatgagcagttcaacactgaattggcaatgctttggaaagcagagaccctgtcagctaaccagccatcctttaaaatcaattcatattttcacagtccctggggattgtttcacagggctaaaatttccctgttggaacagggttacttgaagataacagggacacttgaaggtaaggatgtcaatattttgctgtttctgaatgtcattcattcagagatggcttaagacatttgtaattccttcaaagatggcataagaaatttggattttcaaactttagttttctcatcttagagtttgaggtaattttatttgtcagctgccagaaaataaaaagaacacataaggtagcagactaatatctacattgacctattgtagagccagaaggacccatttatttagcaagagacttctttactgtgtctagttcaggttcccggaaagatgggacaatttgtagtaacactcattccttctgctaagggtcataagataggtttagacatatggtcccattttgatgatgttttaaactttgtttattttacataccctgtgatagagccaatcaatgtaggggcctaaacgtcggtatagcctgtaattttgacagatgcccagattgtggtattgacaaataggacagatgtcccgaggggcatatgtgtagaaatagatgacatttcacagagaatttactaattcaatataatgctgaaacaacatgtggtagtagttgaacccatatatagaatacatttggggaaatatttctcacatatttgacgtggtgcccagaactatatgatgtgaagagtaattgtgtgttttgtatgggaacacattagtaaaacctcatgcaaatcaaaatcaatccagatgaaaaataattaataacggtgtttacaaactcaaataatacctgcacaaggcaatggcataaacaaagtttacaatgcctccagatggcaatatttgaaagatgatttcgagttttacacacaaatcgagaatttattcatataacatatggagctaactaaaatccatataattcaaattcgcttacattgtaactaaatggaatggaaaaggagttcctgttcattttaccactttcagaatagaaaattctggatctggtgaaaattgatcattttccttttgttttaattcaaggtatagactcgtgtctaaagacatggttaactgtttaaggagaatagaggatgaagaagggttaaatgacaagcaagttttaaaagtctgatatcaactaatttttaggcaaggaagatttaaaaatttcactgtgatttgagtgagaggccccttactttttatatcacattgtaagtttaaagaagaagagaataaaaacatcatggctaaatcacctgaaatgacttcaaattttctacaaatgataaacatatccaatgtgataattataattcaaggcccattttaatctgaccctaaattttctttcccattctaataatcaataagctaatcaataagctcataacatcctacagattctgcacacacacatgcacacacacacagagaaacacagtcacttcttcaaacacattgttttttcatttttctttgcctttcatctatttatttattagagtgcccacctccaaggtaagagggttattgagataattttataaatgtcacggggcttgccctcataaagtctatattacagaaaggaagttgagaagaaacaaccaatggttcaattacttattaaaattagtttggatcattatctctccatccactgttaatctacttataatcttctttgctctttaccatgtttaatgaactcttagacttttaacttttattttaagttcacgagtacaagtgcaggtttgatacattggtaaatttgtgtcttgggggtttattgtacagattatttcatcaccctggtattaagcctaatacccattagttatttttcctgatcctctccctctaccctctagcctgtgaaaagccccatggatgttgttaccctctgtgtccatatgtgctcatcatttagctcccacttataagtgagaacatgtggtatttggttttctgtctctgcatttgttggctaaggataatggcctccagctccataatgtccctaaaaaggacatgatctcattctttttacggctgcatagtattccatgatgaatatgtaccatattttctttatccagtctatcactgatgggcatttagattgattccatgtctttgctttgtgaatagtactgcaatgaagatatgaatgcatgtgtctttataatagagtaatttatattcctttgggtattgataaggtttggctgttaccccacccaaacctcatcttgaattatagctcccgtaattcccgtgtgtcatgagagggacccagtgggagataattgaatcatgggggcaggtctttcccatgctgttctcctgatagtgaatagatctcatgagatccgatggttttataaatgggagttgccctgcacaagttaacaagttctctcttgcctgcctccatgtaagatgtgactttgatcctcattctctttctgccatgattgtgaggcctccccagccatgtggaactgtgagtccattaaacctcttttctttataatttacccagtctcagatacatctttattaacagcataagaacagactagtacaggtaatgggattactgggttgagtggtattcctttctttaggtctttgaagaatcaccaccctgtcttccacaatggatgaactaatttacactcccatcaactgtgtataagcatccctttttctctacaactttgccagcgtctttcatttttttatttttgataatagccattctgactggtgttagtatctcattgtggttttgatttgcatttctcagagtctaaaatctagaattaaaacttttaacttggtgagcctatgttgaatgactacagagaacctagataagcaattttcgtttgcattttatccaaaacaggtggcaagaagaaaagtttaagaatttcaagtggcttgattggactcttcttcatggtcgctgagtcaaggaccttctcttctagtgaatttaagggttttgtggaacactagtctttctttatgaactctgtcctcttttctcatacaatttatcttttccacatatggatggaataaaactgcagaaaatataatgaaatggataaccatatattttttaaaatagaaatttttgagtattgacattcaaggttttaattctagatttaaaaatacattttatttacacactcatcagttaatggatgcttgaattattttcacttttggtctattatgaataatgctactatgaacattaatgtataagtatttgtgtgaacaaatagaacagacatggtcagttctcttgggtatattcctacaagtagaatttctgggtcatatggcagctctatgtttgattttatgcagaatttctaaactgtttttcaaagaaactgttttacattctgagaagcaatgtatgagagttctaattcttttacatcctcagcaacacttgttattatctgtcttttttattatagttattctggtatttgtgaagtttcatctcattatgattgtgatttgcatttccctaatggctaataacagtcagcatattttcatgtgcctattggccatttgtatatcttccttggcataaagtctttcaaattacttgctcattttttaattgagttatttgtcttttgattttttagttgcaacagttctttatatattatgcataagtccttgtcagacatacaatatgaaaatattttggttcctgctatacattggttttcccctttataagtggtgtattttgtagatcaaaagcctttaattttaatgaagtccaatttaacaatatttttctcgtgttgcttgtgttttaagtgtcatattttttgttaagtgtcataggttttttaatatgaatgagtgttggattttctccaaagattttcctacaactattgtcatgataatcctttttgatcctttattttattaatatacatattttattaattgattttccattgttgaagcatatttgtgtatctgggataaatcctacttggtcatgttgtgtaatcctatttaaagttattgggtttagtttgctagtatttgattgaggattttttttctttgctttgtatttataaggaatatcagaatttttttcaatatttattttagattcatggggcatatgtgctgctttgttacttggatatattgtctgatgctaaggtttggggtataagtgatcccatttaccaaggtactaaacatagtacacaaaagcaggtttttcaacccttgcctctactcctccttcactccacctgctagctgtacccagtgtctattgttgccatctttatgtttatgagtacctaatatttagctccaatttataattgagaaaagactgtatttagttttctgttactgcattaatctgcttaggataatggcctccagctacatctgtgttgctgcaaaggacatgattttgttctttttatggctgtgtagtgttccatcatgtatatttgccatgttttctttatccattccaccattaatgggcacctaggttgatttcatggctgctattgtgaataggactgcgaggcacatatgagagcctatgtattcttgctaaaacaatttgttttcttttagatacataaccagtaatgggattgctgggtcaaattgtagttcccttttaaagtctttaaaaaatctccaaactactttccatagtggctgaactaatttagatttccactgaaagtgttcaagcattcccttttctccatagccttgccagcatctgttattttttgatgttttaataatatccattctgactgatgtgagatggaacctcattgcagtgatttgcatttctctgatgattagtgatgtggataattttttatatgtttgcaaaccacttttatgtcttcttctgagaggtgtctattcatgtcttttgttcacttgtattcatgttatttgtcttatgcttattaatttgtttaattttcttatagatttggggtattgggacctttattggaagtgtagtttgtgagtattttatctcattctgtaggttgcctgttttctctgttgataatttcttttgctgtgtagagctctttaatttaattagatcccacttgtcaatttttgttttggttgcaattgcttttgaggacttagtcataaattatttcccaaggccaatgtccagaatggcgtttcctaggattcttgtagtttgaggtcttgtgtttaaatctttaatccaacctcagttaatttttttatatggtgaaaggtggggttgagtttcattcttctacatatggctacccaactagcccacactgtttattgaatacggagtagtcttttccctgttggttatttttcttaactttgttaaagatcagatatctgtaggtgtgcagctttatttctgggttctctgttctgttccattggtctatgtgtctgtttttgtaccagtaccatgctgttctggcaccagtaccatgctattttggttaccgtcacctgatagtatatttggaagtcagcaaacatgatgcctctggctttgttctttgtgattaagattactttggctattttggctgtttggagtttcatatgaattattaaatagtttttttctggttttatagaaaaaaaacaacatggtagtttggaacttcctagagacttattgaatggctctgaccaaaatactgatagtgatatggacaataaagtccaggctgaagtggtctcagatggagatgaggaacttgttgggaactgaagcaaaggtgactcttgttatactttagcaaagagactggcagcatttttcccctgccctaaagatttgtggaactttgaacttgagagagatgatttagggcatctggtgcaataaatttctaaggagcaaagcattcaagaagtgacttgggtactgttaaaaacattcagtttcatttattcagaaaggtatggtttggagttgaaatttatgtttaaaagggaagcagatcatacaagtttggtaaatttgtagcctgatgatgtgatagaaaagaaaaacccattttctgaggagaaattcaagctggctgcagaaatttgcataaacaataaggagtcaaatgttaatcatgaagacaatggggaaaatatctccagggcatgtcagaggtctttatggcagcccctcccatcacaggcccagaggcctaggaggaaaaatggcttcataggttgggtccagggccttgctgctttgagcactctccaaacttgctcccctgcatcccagctgtggctaagaggagccagtgtatagatcaggtcattgcttcagagggtgaaagtctcaagtcttggcagcttacatgtggcattgggcctccaggtacacagaaatcaagaattgaggtatgagaacctccacatagatttcagagaatttgtggaaatgtctggatgtccaggcagaggtgtgctgcaaggggcagagtcctcatggaaaacttctgttagcacagagtggaagggaattgtggagtcaagcaccctctggggcactgcctggtggagctgtgagaagagggccaccatcgtccagactccagaatggtagatccactgacaacatgcaccatgcacctggaaaagctgcagacactcaatgccagctcatgaaagcagccagaaagggagctgtaccctgtaaagacacagaggcagagctgcccaaggtcatgggcgcctacttcttgcatcagtgagacctcgatgtgagacatgaagacaaaggggatcattttggagctttaagatttgactgctctgctggattttggatttctatggggcctgtagcctcttcattttgccaatttttcccatctggaatggctgtatttacgcaatgcctgtatctccattgtatctaggaagtaactaacttgcttttgattttacaggctcataggcagaagggacttgccttgtcttagatgagactttggactgtggacttttgagttaatgctgaaatgagttaagattttggaggactgttgggaaagcatgattggttttgaaatgtgaggatatgagatttgggaggggccatgggtggaatgatatgatttgcctgtgtccccactcagatctcatccagaattttagctctcacaatccccatgtgttgtgggaggaacccagtgggaggtaattgaatcatggaggtgggtctttcccatgctgttcttgtgatagtaaataagtctcatgactcatgaggtctgatggtttgataaaggggagttcccctgcacacactctttcttgcctgctgccacgtaagacgtgtttgcttctcctttgctttccaccatgattgtgaggcctccccagccatgtggatctgtgagtcaattaaacctcttacctttataaattacccagtcccaagtatgtctttattagcagcctgagaacagactaatacaacaggattgtgggaagttctccaggcattcagagcacccaccttcctgaattaggagtagggaaaccaactgcaccaagatctctgcacagaagaggtggggtgattcaggctgctgaaccaggcaagcagaagcttggaatgcctggagatctacctgagcatgtagcagcaaaggcccctgcaccaagacctctacccaggaagagtggggcatatcaagctgctgatccaggcaagttggtgctctgaatgtctggaggtctgcctgagtgtggagtagagagggccattctgtaccatcatctacgtccaggaaggttgggtggctccggctgctgaaccagaagaacaggtgctttaactgcctggagatctgcccaggcatgaagtagagaaggcctccctgcaccagtagctcaacagaaagaatagtggtgagtcaggctgctgattcaagtgagtaaatgtctggaggcctgcctgggtatggagcagagaaagccctactgcaccaggatctctgtacaggaagggtggagcaggttaagctctgaacccagtgaacagatgctcctaatgcctggagatctgccttggcataaagtgtagggggctgctctgcaccacaatctatgttcatgaagagttgagtgactaaggctgctagtccaggaaagcggctgcgccaaatgcctgaatttttgcctggggtttgagcagaagacctcactgcactattatcttggtagagcagatggagacatctagaaatggcacacacagaccaattccaggtcactaggctggccttggctgcaaatctcaccacccagaagaaactgcagctgtagcagcactcctcctgccccaggcttgtgacaagggaaagcacaatttcagtgtctgctctggatgtgctttccatagctctcgttgtggaggcccttatcccactctagagcaggcccccccaatctctgcctcaagaataaaattcctgagtggtcatgctgccaagttgccaaagaatgcctgactttgtatgcctggattaaaaatggtatgctgttctttgtcccaggtctgggaaaatgtctgcagcttttcccagtgtctttccctcacaacatctccaagcctctctccatgctggctctagggcttgggagaaagacagtgctgtttctcgacctggatcccttgagttcccactggaaaaatgagtcacatagggaggctctctgcttctctcatatcctcctggagcttcagtcatgtttaccagacagataccatcatacggactgtctgtcagtgttctttctcctccacaggatctggagtgcccttcacaattctgatggtttcccagtttcttcttgaactaaagctcacagagttgaactttatgcactatcttactacttccaagtggctgaggcatcataaaagcttctaatctgccaccttgggaaaaacaaatagggattcttaatttgttttacttgtgacatatttgtctggttttactagtcttataaaaagacttggaaaataatccctccttttctattttttgagtgtgtttgtgaagaattagtgtaaactcttctaaacatttggtagaatgtatcagtaaagccatctattctagggattatgtgtgtattggtggagggaaattttatattgcctactttatttcttccttcatgtattttgggattctcttgacaggtgcatatgtgcttattgttatgttttcttgatgtattaatcctttctatcattgtaaaatgctctttctcgctaatcacaatttatctcttgaagtttgttttgtgtgttattatgaccaggtctctcttgattactgtttgaatgatttatcttaattcagtcatttgtattcaaactgtttgtgtctttgaatataaagtgtgtctgctgactaaaacagatagttggattatgtttttttctaaacccatctgcaaactctattttaaatggagtttttaatctacgtacatttaatgtaattactgatatatagaatttatgtttgccagtttaccagttgttttctatatgtcttctgcttttttatttctctatttttctaagattgccttttctttagtgaatagatatttttaatgcactgtattaatccccttatcactggttttattatattttgtaagttattttcttagggttgcctgatgggctacaagtagtatcttaatttttgaaaatctagttagatttactatcaacttaattttaatagcatacaaaaattttgattctaaatagcattgttctctccttcttcctttgttgtattaccatacatattacatcttcattcattgtatgccaatcagtacattacttataaccattgctttatgcagtttatttttgaatcaggtaggagaaaagaaaatagttacaaaaaatacatttacattctctttcatatgtttctaatttttgctttttctattgttctgcatttgtttatatggactctagatattgtcaagtgtaattttatttcatattgaaatacctcttttaatatttcttgcatggaaactttgctagtaagagattctgtcagttttggtttcagagaataagtgagaatattttcacttctttttcatttttgaagtatagttttgttggttatgaaattattcgttgataatcatttactttcaaaactttaaaaatgtcatctcactgcctctggtttccatggtttctaatgaaaattcagtgaaaaattattcagactcttttgcacatgatgagttgctcctctcttgttgttttcaagattctttctttgtcattttcttttgattgtttaattataattttttaaaaatgtgaatctctttgagtttatgctacttgggagtcatagatcttcttggatgtgcaagttaatattctttgtcaagttttggaagtttttaagtatgttttgtattgttcttcacttatttttatgccccatttctcttctgttccctctccttttgggacttccattatacatattttgctatgcttgatggtatctctgagtctgtttgtctttatttctttttccttctgtttcttgcattagataatctcattgatctatatttaagttagctaactcttttccctgctttctaaaatctgctgttaagtcagatttatatttatacaattgcttattagtattatttatttggtgagacatttattctcaaatgttcctttagctttttggaaatagcttattttagttattaaacaaatttttatcatggtgaatttaaaaacctttgtctactaagccaaacacctgagctttctcatggacagttttattgattgtgtgtttttcctgtgtgtgagccatattgtcttactttttgtatgccttataagtttttgttgaaaactgaacattttaaataataaaaatgtgacaactctggaaattatattttactcccttcaaattttgttgattttgctgtttgtttttgttgtcatttgtttctttagtgacttttctgaactaattgtttaaagtttttgttttttatcgtgtttgaacactgaagtctctgtttgcttaacttagtagtcagtgaaagaatagacagaaatttcattgaagacctggaacccgtaactcttccggtctctgctgagtggctctgtgtgcatttcagggcacacttttaacacccagccggttggttgacaactctgccttagtcttcacattctgctttcccatagcttcatggtcatctggaggtgaaagcttagggccttctcatattttccttgagaataagcattgtgcttagaatgtgcacaatcatacgtgtgtgaccttttatagtgccagtaatatgtcagaagtcttcaaaactcctatttatatttcctagctttttaagttttccagctaccatattatttgccctaactgttatctaccactttagtctaccatgatttaaaaaagttgcctttcaatgttttcaataagtatgctagttaaaaagactttcatgggccagttacaaatgaggtcaaataaagacagttttataagtggtatcttgcagtaagccacgttccaggtcaaacaataattctcagggaactaagctgaaagctgccagattgcttgtagtcagcgattgagggatatttattttcaaggtaactgtataacttgagagcgggtgatgagaataagcagcctaaaataacacaaagcttacagttcttaccataatttaacctttctttctcttttggttttttgtttattaaataaattatttttagatccctcaaagcatttggctaatttccagagttttaaaagagctgattctgattatttttgcacatttttaattgtttatatggaggagataatttgcatatgccctcacatcatcatttgcattgctatcactcttcttcttcatattatggtcaaatgtaatatcactagaaataaaaatattttcatgagcacttgctaagatcaagattcagtcttaaacttgaccttttcagaaatgcttttcaatattcagaaggtagtggttccttcctaaataacacaacatagctgtaaacaattggatctatttcctttcctcacccatttcattcaacaaatgtcttttccctcaactcccttatgttttagaattatctgactcctgtggtcatcttctttctgagggttagcaatcattcaataacttctaagcatataagtttttagaaattcatttacatgatgtatagtaggcacaccatttttcatggaattgaaacaggattcctttttatctcaaacctacaggttgttggtaagcatgtaagtgatacttttcactttggctacatcacaccattctaaattcgtatcttttcaagtgctattatttctgacatttcaagctgtaaacctagaaaggcagtactcagatgtccactttgtggattttgtatttttctacgtgataggcctatgtaataatatagttttccctttcagacacttcgaataatttaaagcaaattattttcatggaaaactggtccatgtttgagtcctgaagtgcttacactaggagggaagtaaccttttcagatgagtgtctgttttactacatttccgcaagaaacatcaaatttcatatttcactatttttaaactagagaagcctaggaaattgttattttccaagaacaatatgatgctgaatttccccttctcccttcgccaaacagtgtgatagaattttcagtcattctcacaagaattaataattaattattctattactgtttcaaagtaaaaattctctgccactatctccacaaaatttgtcactttgccaccaccagcactatgatgactgagaataatcagggcaaaatttgattcctataatgttaatagaagccgactaaatggacatcatttatttggtaagtgttagagtgtaagctccacgtagacagttttttatctgttttttttcagtgtcagataccaagatttgagcacagtttctgatgtatactcagtgctaaatagcatgttgaatgaagggatgaatgacttctgtgctcaaattctatttgattaattcaaacataatctgcctcttgtgcacaggatgaaattatcctgactctgtatttttaattataataatagcaatatgaaatatatctgtataattttataaaattcacaaaatcatttacaaaccacattttctcacctaagactctaaacagagcaaggctttattaacataattttattgataatcacatttagactaggagaaattgagtgtgatttatccaagagtcacagagtgagaaaatatcaagaggtttcaaactcagggcttatgacttctgagtctctatgtatttcactacatccatgcattgtatatagtatttttcaaagtttgcaaaacaatgccccttatttaccttatgtgattcttttatttctccccttccccaactttggagataagcagggttttgtttatctaatgctacacaaaaggtcacccccaaacttggaaaccaaaataattatttatggtaatttgtgttgactgagctcaactggttatttctcacttgagatatctcctggagtgtcggtcagatagtagcaaaatctagagtcatctgaaagttcaactagactggacaaccaagaaagtatcttcattcacatgtctgacacctcaggtgggattgctaaaagagcagacactatagctctttttctttttgtggactcttcatttggctatcttgggcttcctcaaacttagagtcctcagagtgcttgaacttcatgttcaaaaagttggcttcctacagactacacattcctagagaaaaagaaacacgccacattctatcatttacacagggcaagccctcatttattttggttaaaaactatacaaaaaagtgaatactggacagcatgtttcactaagggccatttttcaaaagacagccacactctacaatggtgaacatacatattgtagtactgagtggccaatttctttacctatagcctgggtttgactcacttattggattaccttggaaatccaaggtaaatcttacttaatttctcttagtttccattccttattaaagtatagcaattgttacctcataaggttgtgtcacttttgaattagataatcaaaataaatgaactttgcacactctaaagtgttatctattttattaatggtgtcatgggacattggctgcttctctttgaaaatcaaacctttcttcactggtaccttcttaatcctcagagactagaaatttgaagtcaaaatgtatcatatgaagtgatctttcacctccaccaccattttattccactgttatatgtactcaacagacttcttacagttaaattcattttccaaagcagccattctgactaaccactccctaatattctctgtaccaaatatgtctcaagcctggtaaaaaatggaccctataattttcctggacaacatttccttataaattcaaattttacctaaaattatctcctccataattattccttaagcttctttgagatcagtagcttcaaagtaggtgaagtctcagtaactcgagcagaagatgttacctattaagcatctagcactatcgcaggaattggtttccactcaattgtttaattatcatcactgttctctctcaattaggaaaaaataaggatacaagagaatagaaagtagggcagtatcaggtattgtgttggagaaaggcagaaaaattgaggagcaatgaagtgcatgtacggagggttacgctgtgaagatagtacttcaatagtttccaacacggtgcaaaaagaacttttatgttctgaaccaatcttaatgttaaatgtaatctttatctctcactcattgcactaaaagaaatacttgaattataattcttcatttgaaacaaatgataactggaatgattcagtataggggaaaacataagggggaatgcagaaatggtcattttcaggaaaatgctctctggtaagaggataggatgtggtgtggtctttgctagaattactgacagaccagccactctcaaaggaaggaaagcaaagaatgtgatttcagatgcaggcatgctgatggatttgatggtgggagcatcaggaaattctcttttggctgctttcattttccctgtaaaatgaaaaacaagaatattagctgagagaggaagggcagaaaaatttggaggtttaagaagagaggtcaaagtatacctcagaaaggtacatgtcccagctaggacccaaaaactcttttaagggattagtatgaatggtggaaaagaaagaattttgcttttctcagatctggaattgcatgctatattggcctggagctgctaacagccatctttccaaatgtgtagaaaagtcagactgaaaacaaagtcaacacagaaaataatagaacaaatatggaatgagagaggcaaaattcttacattaccattgcagggcatgacagcagccaggcttgtacagaaagcaccccctgaggttttctactacatgagtgaatacatttctttgttgattaagcttgtttgaatgtgtgtgtttttgtcaattataatcaaaagagtactctatacatcagatagttaaggagtagtgttttaagtttcaaataataaattcttaaaatgaccagaaaaatagtgtaacaaattgatagattatcaagattgtttttagaattagaaaactgagtttgaattttgactgatccatgtaatgagatgtgtgaactttgggcttacttaatctccctgagcttcgtatcatctataaattgagtataatgataacatctcccatgtaagtcctgggcaatatatcaatattttatacatattatcttcccaatattccaattctccagtagagcaggtattattatcttgcatttacaaatgagaagagtgagacttagcaaggttaataatcagcccaacattccacaactagtaaggtggtattgaacccatctttctattacctgaaacctggagtgaccacaaaatctcaattcacctgggactattgtagtctgtgcttattgcacctgcattccatccaattagcacattctttcacttacaaaaaaaaaaaatcttggatttgacaatagattagatggtcaccgttgaaggttgggttttacaagaagctgactctgaagtcacagatgagcttgccggaagttaattggggaatactttctggatctacaccttagggggtaaaaaaaagatcaagattggccaggggaagaacaaaagcctcagcaaaccgcacagggaccttggaagctggaatgacactttggagttgttccatttggaacaagagtctctgagccatgatatcactgtatcatcccactcaccatatgaggtcctgccctaagaaagggagtgctcttcaacaaggtagcactcttcagctgaggacaatttctggagaaagctgacagctgagagttttatgctggcagcactcccagtagctggagaaagaagttcttcagaaggactgggccacgtacatctctaccacagctgtaaactttcatttcttatgattgacttactgcctctggacaatagtttctttacaaagttgctctgagtattttttttttttgagatggagtctcactctgtcgcccagggctggagtgcagtggcacgatcttggctcactgcaagctccgcctcccgggttcacaccattctcctgcctcagcctcccaagtagctgggactacaggcatccgccgccacctcgcctggctaattttttgtgtatttagtagagatggaatttcaccgtgttagccaggatggtctcgatctcctgacctcatgatccgcctgcctcagcctcccaaagtgctaggattacaggcgtgagcaccgcgcccggccgctctgagtattaataaaagcatgcctatactatgtttaatagtacctggtatatattaatatacacttacatatttatacacacaccacacctattcctatacatacagattcaataaatggcaacaattattttgttaaatgttattatgtattacgtgtgatatatattataataacataaatattattgtaaagttaccacttcaaaacgaggagtctgaaatcattgaaaaataagatttataaaattttctttggagtttgtctaacttgaaagatcgccaagagcagcccagcacaatgtcctgatacataaactgttaaaaatcctgaagcttcctgagagccacataggcagaaagaatctaggtataggtcagtgaaaggaatcccatatgagaagtggtggtggaggaagtgtgggttggtggaagagatgtatggctattaacgtgctattgaaatccactaattctcatactcaaaagcctttgggaagaatagaggaaaatgtttttcccctatttgcaatcttctttaagtactaagcccataattggggtggttgtggaaaaggtggatctagaactccatcaaacaacttccctctggccatttctgcatcctcactgtattatttgttaattctactcctaaaattgtgtggaggttaaccagggcttcaaactaaacatattagtagtaaaagagagattccctattgaattaatctgacgtgattacagaaaaggcaactcattcctccaggacttggagactttgaagtgtgcacatgcatagaaaatgtggtggttaatttttctaaggtcagcttggctgggctaaggaatgcccaaatagcgggtaaaacattatttctagatgcgtctgtgaaggtgtcattttgatagactgagtaaagattgccctcaccaatgtgggtggagcttatgcaatgcattgaggacccaaacagaacaaaaaggcagaggaagggagaactggctgtctctgcttgagttggaacatcatatttttctgtctttggacatcagatatttggttctctggactttggactcaaaatggaatttctgccattgattcccctggttctcagaccttgaggtttggactggcactacactacttgccttcctgggcctctggcttgcaaacagcagttgataggatttctcagcctccaaaatcacatgacccaatccttcataataattatctttctatatatttttatatagttattgattctgtttctctggagaactctgtctaaaatagatatttggaaatagcaagcaaaaattttggaaactcttcctagtcaaaatataaagtagacaattaattaccctcatggagtagtagcatcctgggcaatatattttgctaatgcagcaaaatacaattgttagttgactcactctagctctaagtctatctatctatctatctatctatataatatatatttttttgtctctttcaattttcttatgctgatcaagacgatcagaagactggtttttagactattggtaactactacaagtttgaaatatttaatttgagttaattcatatacattatgagaaagtttgagagaaacctaatgctcaattaacaaataatttaaatattatttccattttattacttgattccccaagtctttcagtggctgccttggataataggtatgctttggaatgtacatgtgagatttcaaaagcaaaacaaaatgaattatgacattcttttatgaagtagaatttctgagagtaattcagtgtaagtaaaatcaatataaacatctatattatccctgattgatgggaaaaggataatatactatcaaaactaccttgaaagtaatcgtaaagtggattttccactcaggataccttttcacagttttattccctaggagagaatgtcatgtgctattaaccctcatgaacccttgaccttggttcacataaagacagtgagaactggtcctagttattaaagaaattaggcatagacacattcttgcttttatagtaagaaataataaggttttctttcaccctggggagaggttattaaagctaaatattacaatgttttttaagggagagagttcgttttgacaatccaagagaagtgtatgttttgcataaatacataatgtagatttgtgattttataaagatgacaaaaagtaaaaacaaagtaagtctgttaagaacatatagaagaataagaaacattcctgttagaccagcttgtaaaaacaatttaaattattagacggagactacattccattttataaagagcaaaaattagataggtaattgtcctgttacgagttattcgagaatgttttatatatttaaataattcgctaccaatgatggcatgaacagaaatacagattacatttactgtcaatctctatttgaggaggtttaattttgtgattgtgtccagaattggtgggttcttggtctcgctgacttcaagaatgacgccgcggaccttagcagtgagtgttacagttcttaaagatggtgtgtctggagtctgttccttcatattttcagatgtgtccggggtttcttctttctggtgggttcatggtctggctgacttcaggagtgaagctgcaggccttaacagtgagtgttaacagctcttaaaggcggcacatctggagttgttcgttccttccggtgggttcctggtctcactggcctcaggagtgaaactgcagaccttccacgtgagtgttacagttcacaaaggtggtgtccagagttgttccttcctcccatccagagttgttcgaccctccccgtgggttcatggtctcgctggcttcaggagtgaagctgcagaccttcactgtgacggttacagctcataaaggcggcacagacccaaagagccagcaacattaagattgattgcaaagagcaaaagaacaaagccaccacagcatagaagggcacctgagaaggttaccgctgctggctcaggtggcctgcttttattcccttatctggccccactcacatcctgctgattggtccattttgcagagagctgattggtgtgtttacaaaccttcagctagacacagagtgctgattggtgcatttacaatcttttagctagatggaaaagttctccaagtccctacccggcccagaagcccagccggcttcacctctcactggcgctggctgcaggactttgctgccgcacctaacccgggcactctggcagcctagagaaagctcctcccagacaatcaagaggaaaagaggggaagagagaaagagacggagagctgccatcatggccaaagaccccgcgaagagggacggcggtctacgcacgggacccagcctccgatcaagcccagcaggtgccgagatcgcgcccacccggaccccacgctggctggccagcgctgcgggcagccccagcttctgcccgcgcctctctcttcacacttccccgagagcagagggagccggctcaggcctcagccagccccagagaagggccctcacagcgcaggggggcgctgaagggctcctggagcgtggccagagcggacatggaggccgaggaggcgccaagagcgagcgagggctgctagcacgttgtcatctctcatgatgttgtaaaataagaaagagtaaatgttattttagaattccttcctggccgggcacgatggctcacgcctgtaatcccagcactttcggaggctgaggcgggcggatcatgaggtcaaacgatccagacaggagatcgagaccatcctggctaacacggtgaaaccctgtctctactaaaactccaaaaaattagccaggcgtggtggcgggcgcctgtagtcccagctactccagaggcagaggcaggagaatggcgtgaacaccggaggcggagcttgcagtgagccgagatggcgccactgcactccagactgggcgacagagtgggactctgtctcaaaaaaaaaaaaaaagaaaagaaaagaattccttccttgtttcctgctgtagttatttgtcaaaagatacaaaaacatctataagagttaagcaaagctatatttattttgctgcaacactgctatgcacagtgacatggtcaagttgctttttataatgatttatagtgatattaatttgcatcagtcgttttcatgaccccaaagccaactcaataataccagaaaatatttgtttgcttgcctacattttgtaataatccaatgtcctgaaataaaaatgaatattttcttcctggaaataaagtgagataattttcttcttccgagagagtcatgaaacaagaacagaatgacattatactaaactatttcacaaatattggtcaacagtggaggcttttttgttcatttatgtaaatttgatttggctctattttcctaagttgcattttatgcttctttcacctgccttgccaaatgaaaagaaaaatcatttatttattaaaacatacactaatagaagaaaataatttcactcttcacaaactttggcattatgaagtcactggttactggagatttaatttctgtaacatatctgaagtgcttatttttttctttccatgaaggaaaccttttggaattaagatatggtacattgaactaaacggggattgcatttgctgtttctgtgataacattttacatctgaaattccaataaatatttctcttcttgctttgaggtggtttagttaatcattcaggtggttggctttcataagaagtaaaggcatgccagcatttatagtttcccagagttcgttttttgcctcaagcttgtatttattcttattacactcactagcttagataccaggtgaatacctgggagaaagaaacaattaatttcaaaagtaataaaaataaaagaacaaaaaaacacaaaactattcaacatgccagcaatcctgttctcttaagaaacctacctgtttttttcaatgtgtgtaagttttagcattttatagcaattagatgagtctgtatatcactagaacttctgtcgctggaattaggacaaaactattttctgcaataaatatttggctctaaaaatctattttgacctgtactataatgcatagcagcagaattaaaatattgtgtgttatcatcaaaagtttcagccttattttttcacatttgaatataaatattaaaatgatgaaggcccatttcttttagtctttttattcttagagaatgctgaataaatgttataaaacaagaaaaagactgtaaaataataattgctaattataaaaaaaatttaaaaatatgtcatcaagccacaatagcggttctttatttctttttttaatttaaaatggacatgaacaaactttcataatacctttgtggaatctagttagagctttactccattacagaatagaaacttttcactgtgaagagatcaaaagcactgctttcctttgtggcaaatgaatattttattatctaatgctaaataaaatttgctggcaaaagaaatgatatgctagtaaaaaaacaacaaaagactttttctgacagtatgatttacatagctacattttcattacttttatttttctacataactagtgtcttttcagttgcaaatgtttgacattctgacaagtagtgtggcagagtcttagattataggttgcatttagccaaaagaaagacttcgaatggaatttttttctattgacacactttctaacaacatacttattttctaaaaaggtttttataacttagtgttgataatatcaaatatctaagcaattttgcttaaaaagcatagaacaccaatatttaatgaagattaattaaatagcacacattgactacttgtttaaaaatattcggaaaattttgacacatgctaaagtgctgaagtatggttttggccttccataaaaataatatattgtgcataaatggacgcagaatgaagaaagcaatgagaaaacatctagaaaattgctagtgtggtaaacatattaaaataatttggcatgggaaatgttttttctcttttaaatttaattatggtaagaaagaagagcattttaaagaaaatgttaatttccatcaacaatatgcaagagaaaataatgtagagtatgtatattagagaaacacataactgcatatatgtgtggttaaaacttaatgccttctggctttgtcatttataagaattattacctacacaaggagtactgtgctgaaccctttacatttccttagttttttcacataaaagcaaacacgtctccattttctttctttttttttttttggatgttcacctggtatttacctctaaatttctaaataactgtggaaaggagggttaacccaatagatgagattgctcaaaccttccacattcccaagaaatatctattttccggactagtccctggctggctcatggaagcttaagcactgggcttctcagagtcatgaaaataaggtcactccactttttactctttggttcttggactcatacagtctatcttaatggttaaatgactgtcgggtcaacacacattctgcatctcaaaggacaacactacaatcccatgcatattatttccaagtttatgcttagcttcactttaaattttctcaggcctcacctttttgggtgatatggggtttagtatgcaatcgtcttgtgtccattaacacacctctttcaccataaaacaggtttctttgcctgtgagtatataatacagggtcccatgtcaatatatctgtgaacaatactatccttaactagtagtgtggtcctagccattgttagcaagaaaagcaaattttacatgagccttactcaaaaccaactgctcccctttttggaatgatcctaaatgctcaacttgcaaccaagtggctggttggcctccccatagaacagtgtcctgttgaggtcatagtttctgatgatgacaggatggatattctgcagccacaatagaaacctggatgagagggagcctatgctgttggcttgccagcagccaccttggctacatccactatgagtgcctccactatgagcagctaaggagagatactagctggcatttgctggataaaagacatcccatccactttgttgtttagtgtctgctcttcagtgggtgttctctgatgggcattgatgtaagataacaatacatcttctttctacctgattccatgtgttcatctacactactttttcccaaatcgaggtcagtgttagggctctgaacacaataccctaaagtttggtacctggtgtgctgagtactttgaactacaggagattggaaggacctcagaagcaaggtctttctgacttcttatcctcctgtttccttcttctccttctttgctgaagtcagtcatggaactcagacttcctcttctccaaggcggatcatagaaagtaaaattcttcttccccaaggcacgtcatggaaacaaaaattcttctccaaagcaagccataaaacctagaaggctcattctaacttctttcccttctcccttgaagacacttattctaggaaggtcctgcccatacctaggaggaagaaaccctacataaagaggctaataaatatttgaatagaaaggcattattgtgtttcccccttcagtctgttaccaatggattatacacttttgtccagtcaactttctacgtggatacccattcttcatgagcctaagcatcaaaatagacagttccccctgggtcattgggtcttcatttctgaaggctcctgtgtcatgtaaaaaattgattaaataaattgctatccttttctcttgttaatctctgtcttttgttacaggaatgtcagccatgacctatgatgtgtgaagaaagatatctcacacctttctaccccttcaccactgtctattccactcttaatctgcactcaactactgtgactctccccttggtctcttatcccagagtactgtgactctacctctaagccttgcttcctgctcttgtgccattttttacatctttctctaatcttacggattaaattatatccatttgaacgtctgggatgaaatctgttttctgatgcatcccttacaaatataaggacatttaaacaaatatttaagggaggatatctcagaggagactgttttggacagaagtaacaccaagatctaataaagaaatcatactttgcctggatctttgaaaaacagtacgaccagtgtgaatgaatggagtaaccaagaggttaggcagtaggagatgaggccagagaagaaagagggtgtggtagcccccaatcctggcacttacttccactggatctaaaatcgagcatggaattatgctgaccacatcagtctaactaatattgatctaagttatcatatgactagtaacatttatgttgtagcacctaaatcaggagtctgcaaaggatagcccactgccaaaatctggcccactctccagtttttgtaactaaaatgttatcagaactcagctaagtccattcatttacaaactgtctatggtggcagagacaatatggctcacaaaatctaaaatatttactctctggctctttatagaagaaatttgctgaccccttgtctaaattatagcaagtatgaaatcctctgtcatcagcaatggcatagaaggcagcataggaatttttaaatttgcccttgaattatatcataagccttatgtttgaggtcgtatttttgcaaagtgctgagcacccctgtcctacaatgaggagggcccactttcctttctcaattggtctgtcttataacatttaggaagagactcacagtctctctgtggccttgtattcttggctaatatcctgtttttttcttcctagagtactctctactctgtcttagagtttccaactgtttatctgaagtagtggtgtcagcctctgcaatgctttctgttctacagggtgtagggtctttcttttttttttgagacagggtttcacttccttgcccatgctggaacacagtggcatgataatggctcactgcagccttgacctcctagtcccaaactaatcatcccaacagcctcccaagtagctgggactacaggtacacaccatcatgcctggctaacttttgaactgttttgtagaaaaggtttccccattttgcctaggctggtcatgaactcctggcctcaagccatccaacccacctcagccttccaaagcactgagatcacgggcatgagccacagtgcccagtcgagtgtagggtcttgatcctctggtctgtcccaccttgtcttcttttgctacaagtaattagacaaagttctaaggtacaacagggatgctgagtctagtttgtttaaagatattattcagttcctatgaaaagatccatgagtgtgtacgttggtttttagtacagccttgacaagttaatccagtagagaaacctgcatgcaaatgtgatttctgattatagccttggctacttatgcagtttttggtgttactgagtttttttaaacaactttccaatttcacaggcttacccaagggtatgatcaatgaaaaccacagcttctttgttagttgtaaaggactcagaagtcagtgacggctgttattgactcactcataaacagcacattaaggaaaaggaagttgaacagtcatctacagttgtaaaaggagcacaaatagtctctgtttaacttttttttctttttatatgtggcccgtctaacaattctatcatgatcatcatcaatcattatcatcctcctcaacaaagctctaattttatttagtttcagaaaaatttaagctgatggcagttcaatccctttgaatatctgtgattgagatattgttctttaattgtgaagcctcctttagattaatattaataaaatatttatataaattttgatgattttataaatgtagtcttgacagaatgatatgatctcaatcacagaatagtatttgtgagaaaccaatgctacctcattcggtaacttgaacttatatagttattggctgtttagtttttcttcttcatgataaaacaaaacatagtaatcagatttacaaacctagtaatcagattacgagattattcaactcaaatatatacaatataattgtactacaagagctgtttgtacaaacattttcactaacatcaccagaattgagaaatatgtatagtaatgtatattttttattagatagtttaattccagccaagtatcaagccatttccataatctgacatactagctaaggaaaaataatgaggccactcaaaagtctctttttctagttgtctcagtagcttcgatgtgataagcatgaaaaaacatgaattgctaaaccaaattttaaaaaaatttctgaaactatataacacttctgagagggctgcagatttgttagtaggttgtttttcagtctgaaaaaaatgattaaatatttctgctggaatggaacatttcagtcataacaaaatataaactctaaggaagctaatactagtattgtttgttaaatccttttgtattctttgcttttcatggagggagagagttaagttacaagggaatggtgaaccacaacaaatgaaaagttgtgagtagtgtacctttgcattgctgtatttcaaaaggtttgccaaaaaaaaaaaaaaacgaaaaagaatgtcaattatttttctctaaaattgtgcctaattatgttatatgatattaaattaactgtttaaagagaatacatagtatgcaaaatacttcacacttcacacatatcatttttaattgaattgttaaaaaaataagcacaattgcctctgtttcaccaatgattaaattaagatgaccataatctatggaagctgcccaaagaaaaacagtaatggagtcagatataaatgaatcagactccaaatcccaatcactttttcataaagtgtttagtaagtatttttatctaaaatataagtgtgtggctataaaaacaccaattatataataatttgattcttgtttctatttatttgaagcctaattagtgtatttccacaatatataacataatgctaaaaaagaaatttggtattttcagtttcctttaaattttctgaactgattttattttataaatgatttgcatttaccagaatgttataaactcagtaattatgttttggttcagtgttttttacctgccatctacattacataaaaatcatttctgtaaaaggaagcagattttaatgagcaagctacacagaaattttcatctcacacttaacaatggatattattgttcttataatttgcacttctcagtcataagacatccctctgtggttgtcataattggtctaatgaatttcttaaaataaatgaaagtctaatttgatccggtgcccatgaacaatccactcattcaaatctaaatcactgacctgatttgaagacgaatcatgccaaaatgaagtcatgctttcctattaagtgtgttgcctcagtgcaagcttttgaatggcttgttcttaaggtttgaagtggggatttccagtgacaaagaaacacaatttgatctcataaccctagacacccagacttattttaaatgatagagacttaagattgagagaaaatctgagtcatcatccagttcagtatttttcacttagtgggaaatgtactggtcaccttgggtttgaacagtttagcaacattgcaggatcttctacagatgcatacataagcatttgaacaaattctgtaggtaggcaaagatcattgcagccgaatgtctaatgatctttatcgcagagttatctatccaatgttccagggtaaatgttctattattaacattcctgaggaaatacattcatggatatatatgtttattatattatttaactactatttcaaatctatatcaagactggtcttaacatttctaaaataggtaactatatcaacatcataaaaaatgctgccacatttttttcgagaaagaaatactctctatacatattgttaaacctttctgcattagaactaaagaccgtgaaaagaagaacagtttttattgtgttaagacactgattgctggttaggaaagaatgcgtgtgtgtgtgtgtgtgtgtgtgtgtgtgtgtgtcagagagacagagagagagaaaagcaggggaagcttgtaatgcataatcaaatactaaggttatgagagatttatcccagattatctataattttcattggtccctgaatggtggaggaaaggtaaaaatatctttaattccagatttcatctttggccaccaacaaaggggcatcacttaatcctattggttttaaataccaatgaactagtgtaaaagataaggattcgtaaattatttcactcattcattgaactagaaaatgaactagaaaagaaaattgaaaagagaatgcagaatggcacttactcaaatagttttgatgatttctgcttcactggctgattttgtagtgggtggctggaaattacagtgggatctttaaataagtttagagtcatatctctgacttaccctgagtaatttttgacccagtaaagctgtttttttttggtaggcttaaaaattccactgagattcttcagtcacccactcaaccacttccaaatgaatctgaaaaacagaaatcatcaaaactagtagaataaatgctgctctgttttaaattttcttttccagttctcattcactgagatgagagtaaacattgaataaaacttcatgttaaaatgtccatactatctaaaacagggtatagattcaataacatccctatgaaaatcccaatggcaagtttttacaaaaattgaaaacaattataaaattcatatggaaccacaaatgaccctgagtaaccatagcaatcttgtgaaagaagaacaaagatgaaggcataacactagcgggtttcaaaatacattacaaagctacaataattaaaacagcataatagtagcataaagcagacagatacaccaatgaaatagaatagagagtacataaataaatccatacatatattgtcatgtactgtcacatgtacttgaattttgacaagtggaacaaaaatacaaaatgggaaacagataatctcttcaacacatggtattggaaaaactgaataacctcatgcaaacaatgaaattggatccttatcttacactatacaaaaaacatcaactccacatggattaaattttgtaatgtaagacctgaaactgtaaaactcctagaaaaaatatagaaaaaacgctttatgatattggtgttggcaatgatttcttgaatgtaatagcaaaagcacaggcaaccaaaacaaacatagacaagcagaactacattaaaataaaaagcttgtgcacagcaaaggaatcaatcaacagagtgacaaggcaacatatgaactcagggaaaatgtatgtttttccaaaccatgtatctgttagatgttaatatgtaaaatatatgaactacaatgcaataatttaaaaaaagcagattaagccataggcaaaggacttgaatagacatttagccaaaaaaaaaccatacaaatagccaacaggtatatgaaaaatatgataatcatcatcactaatcagcagggcaatgaaaatcaaaaccacaatattttcacctcaaaactgttgagatggctattatttttaaaaaatgcattgataaggatatagagaagttggaacatttctgtactgttggtgggaatataaaatggtgcaactgctgcagaaaacattaagaaggtctctcaaaaaaataaaaatagaactaccatgtgatccagcattcccagtttggggtatatataataattaaaaccaagatcttgaataagtatctccactcccctgttcactgtagcattattcacatgagccaagatataaaaacaacctaaatctccatcaatagataaatggataaagaaaatgtgtctgtatgtgcaatggaatattatacagacttacaaaaaaagaaatcctgttataggtgacaaaatggattaacctgaaggacattatgctaagtgaaacaagccagtcacagaaggacaaatgctgcttgactccatttatacgaaatatctaaaatcatcaaactcagaaacagagcagaatagtggttatcaaggactgtggagaaaggaaatgagaggttgctacttaatgtgtaccaagtttcaattatgcaagataaataagacctagagatctactgcataacatcgtgcctatagttaacaatactatactatgcattcgaaaagttgacagtatgtcttaacacaatatagacaaacaaaatattttctttggcagattcacattttattatttgattttaattgaaatatcttaatttcaaatattttattaagtgctttgtttgtgtcaaaaaactttctttcttttttttttttttttttttttttgagatggagtctggctctgttgcccaggctggagtgctgtggcgcgatctcagctcactgcaagctctgcctcccgggttcatgccattctcctgcctcagcctcccgggtagctgggactacaggcgcccaccaccacgcctggctaatttttttgtatttttagtagagatgggttttcacagtgttagctaggatggtctcaatcttctgaccttgtgatccgcccgcctcggcctcccaaagtgctgggattacaggcgtgagccaccgcaccaggctaaaatctttcttaatagagacagaaagatgctgtgtaacatccattgattattcctaataggtaaattaatgacttttaaaaatgatttacactatttaagcagtaaaaatactggccaaaatttttataattttgcatacttttttctttttaattcaataagtatttaaaattagcttctgcatgtagaaacaaaacacaattattcttaaaaacaatcatctaacaagcaaatctccatttttatttaaattaaggcttcttatttaataacaaaaaaaagagtgcactgtggttgaaaagtatacaattcttttttttttttttttttttttttttgagacggaagtctcgctctgtcgcccaggctggagtgcagtggagcgatctcggctcactgcaagctccgcctcccgggttcacgccattctcctgcctcagcctcccaagtagctgggactacaggcgcccgccactacgcccggctaattttttgtatttttagtagagacggggtttcaccgttttagccgggatggtctcaatctcctgacctcgtgatccgcccgcctcggcctcccaaagtgctgggattacaggcgtgagccaccgcgcccggcctacaattctttagccatatagtgaaaccttaataaatgttcaggtttctttccaacaaatcaacaaatacaagtataaaggcattcaagaaatatagctcatcatgtacattgacttcaatcacttcatttttatgaagcaaagttaacctagctaactagtcttttatataccatgaatacttaatattaattattcaaagatatttcatttaaatcactgttaacaaattgagattaagtcaggctgtccattttaaaaacagtaactgctgtaataaaatattaatctgagttggagactccaagaggacaaagaacattagaatatatacaagtgatttaaaagtaacaagcatgcatttgttcctcagcacatctgtactttgaagcttctactcagtattgtgtggaactaaaacatgctttccacttataaatggaataggagacctgacacaatccttatacacgttttagcctggaaatgtgctagtttcatgttttccatttcctctgaccttttcccttccatcagaactataaatggtgaacagtatgcttatttgtatttgttttactgtttgaggctttttgattttcaaggaaactcattttgtgcataactttttaaggcaaaattaaggaatatgttttgatgagacaaggaaggtataattaaataaatgagtttaattaagggattttaggatttcaaaatcaagaagagaagaaagtaggagaacataaaaataataaataaatcagcaaataaaaattcccagacacttctttgagagtgtttacatatttcagtgaaagtaggtaaaatataaatatagtatttagaaaaattaatatatttatgcaagtaaataaaaaccaatttatttttaaacatttcaagataaggaaagcacaatatacagaatttcaagttatttagcgacaataactgcaattatttagagacaataacaatgcaagttatttagagagattttcaacccaatagcaagacattatgttaatatctgtttgggaagtacattttcagaagactattaaaataatattactagaattttgctataaatgacaacactaaataagaaaattgaaagtaatttgtgttaattagctctataatatccattcaatgatatgtataatttcaaataataatgaaataacattatactatagtgttatataaaaacataaggttttctaatatatagcattcaactcatgggggtgtggggaggtgaggtgaagcaaatttcagaacaatgtgtgctaagtgcaaacatttgtgtaaaaagcttctgttacatgtatagagtttctctggaagaatttataagtgcatataacacatattcaaacctacaaacacagagctgtttctattggttgattccttggttggctggaggagaaaggtaaaagaattttgatttttactttgtattctcttatggtcttttacttttcttctcaatgcacatattaccatttaaaaaaatagattaaattttaataatgttgctaccaacatacttgtgtttatttcactgtcaaaattgtgaataaattttcaaaaacttagcttatattttataattatagcaaactacatattattaatagttttacagaacaaaaatttcaaaaatatattaatttctataaattatatcctctaatattaattagaagagctatctgatcaaaacacatcaggtgatttgtggggagacaaatatatttgcaaaatacagcatcctcattaaactgtgtattaggccattcttccatgctgtaaagaaacatctgagaatgggtagtttataagaaaggaggttgtattgactcacagttctgcaggttgtacaggcagcatactggcatctgcttctgggaaggcctcaggaagcttccaaacatggcggaaggtaaagggagagctggcacatcacatggtaaaagcaggagcaagaaagagagtgagcagaggaggtgccacacacttttgaaggactagatcccatgagaactcactatcatgaagtaagtaccaagtcatgagagatctgcctccatgatccaaacacctcccacaagacctcaccccagcattggggattacaattcaacatgatatttgggggatatcattctgaaaagtacatcattctgctctggccctcgcaaatctcatgcccttttgacatttcaaaatggtatcatgccttcccaacagtcccctaaattcttaactgtttccagcattgactcaaaagtcccaagtcctgtctgagacaaggcaagtcccttccatctatgatcctgtaaaataaaaaacaggttatttacttccaagatacaatggaggtataggaattgggtaagcattcctgttcaaaaagggagaaattgatcaaaagaaagaagatacaggccccaagcaagtttgaatcccagcaaggcagtcattaaaacttaaagctccaaaataatctcttttgatttcgtgtccgacatccaaggcatactggtacaaggagtggactcccaaggccttgggcaacgtgatttcttagttatagttaaaaatggattatggatatttacaaagctaactcacatctccttgtctgactcactctttcttctttccttccctccctccctcccccttccttccttccttcctttcttttctttcttttcctttttctttctttctctttcttctttctttctttcctttatttatttatttcttctttccttccttccttcctttttttcttcctttcttgcttgcttgcttgctttctctttcttttctttcttataatggctgatcagtaattcatttttagagaaatatgagttgatgtatggatttttaaaattcattgatcagtcaataagcaaatactttgctatcaactgtgacatgctaagcatattaggtgaatagtacaaaatgttgagcaagatgcccttggtcccttccttcgagagattacattcccataggagggtggtaaattcagaaatacatcaatataaatagagtatataggtaggaatctagatagtgtgatacatgttctcatagtttacagaaacacaaaaaaaatatctgtaacctggatataagtgacaaagaaaggaagactgcctatgccgaaggattcttgtataccattctaggcctgcttcacggcttttttctgtccacccttcacaaggccagggaaactttgttcaccatcatgggatatggttgaggtatcaagtgcctctaagaaggaccacattatccccaaattttagaagggtcttctgttgaaaagacttctttctccagtacattgtctgggcaaacttttttatatatatatatatattatatatatatatatatatataatctatctttgtgccaatcctacaatgccttgattaatgtagttttacagtaaatttcaaatcaggaagtcagggtcttccaacttcaatctttttcaagatgattttggccattcttggtcccttacattccttttgaatttaaatatcaccttgtcaattttgaaaaaggaaacttggattttgacagagaatgtactgaatctgtagattattttgaaaattttaccattttaataatattaattttcttacacataaccatcaggtggcttatcttttatttagtttctttcaacaacagtttttagtttttagtgtacatgactttgattcttttgttaaatttattcctaagtgattttaaattgtagatgttattttaaatggagttgttttcttaatttttgaatttttcattgaaagtgtatagaaatacagctgcttttggggtagtcatctcatatctggcagtcttactgaattcatttcttagatttaagaggtttttatgcagattcattagaattttccatgtccaagattatgtcatctgctaatagagatagttgtattttttcttttccaatctggatgacttttatttcttttccttgccaaattgtctgggccagatccttcagtacaatgttgcgcagtcactgtgagaatatccatctgtcctgaacttgggggtaaatcattcagtcttcactattaagtataatgttggcttggggcttttgtaaataacatttgtttggttgagctagtttccttctataactagcttcctgggtcttttttttttacttttttgttttaaatagtgtgtgattttgtcaaatgctttttctgtatctatcatgtattcttttgtcctttattgtatcgagatggtattttaccctgacttatttttgaatgttaaaacaagcttgtattcccgggacagatccttgttcatggaaaataatcagttcttttctatatattgctggatgtagtttgctaatattttgtttagaaatcttgcatttatattcataaggtattttagtgtgtagtttattttcctatgatggctttgtttggttttggtattaaggtaattttggcctcacagaataagttgtgaagtgcttgttctaccttttaatttaattttatttttgaacagtttgtgaaggattgatattacaatttcatagacatttggtagaactcaccaatgaagccttctgggcttggactaccctttgtgaaaataattttattacaaatacaatttctttaattgttattggtttatttagattttgtatttattcttgagtcatttaaattagattatgtctttgaggagttaatttcatctaggttatataatttgtggacatacaccatttttaggtacctgaaaattcgttagtgctgctattcctcttcattctgattttggcaatttgagtctttgttctttgttttcctatttcatctatctaaagttttgtcattatttgttgacctacttaaagaattacacatcttttatttcactggttttctctataacttttctaatctttattttatttatttctactctaatttttattatctccttccttctgcttttttgactagaatttgctctttttctagtttctgaagatagtcatattattgatttggatttttaaaaatatggacattggcagttatactttttcctctaagtactattttatctttatcctctaagttttggtatgttttgtttctatttttttaatctcacaatattttcccatttttctttaacttattcttcgattcatttgttatttagggagtttattaattttcacatatttgggatttttccaaatttccttctgtaattgatttcaaatttcatcccatttgggccaaagaacatacattgtatgatctcagtcatttacatttattgtgccttgttttgtaagccaatggatagtctaagaatgttccaggtatggttgttccatgggtgtcttttagttattgtttgtttttaagattgatccttgtaatcttctgcttagttgttccatctacaactgagagtgaggtactgaaacctccaactattgttgtcaaattgtttatttctctatcatttctgtgtatttttgctttatgttttttaacttattttttattttttgatttttttgatacacaatagggtatttatacacatttagagtaaacaatagtcactctccttatctctcaaagagtagatcttatttcttctaccaaactaagtatttgtacccactaatcaacctctctttgttactcttcaccctctatctttcctggcctctggtaaaccaccaatctactctctatcttcatgagatccacttttttagctcccatttatgagtgcgaacatatgacatttgtctctgtgtctggctgatttcacttaacgtaatgacctccatttctgtccatgttgctgcaaatggcaggattttattcttttttaagattgaataatattttattgagtgtatataccacattgtctttattctttcatctttttatgggtgattagattgattccctatcttggctattgcaaatagtactgcaatagacatgagagcacagatatgtctctgatgtattgatttcctttattttagatacatagtcagcagtgaaattgctggttcttgaccctaacttggatttaaataatgtaaaagaaatcttatttttatcttataattggcacttattatcaagtgctgatgaaaatattttcatttcaggtgatattaaattctactccaatgcaaaagataaaggaatggtatcaatgaaaatggtggagtgagggcatcagcaaattacttcctccataaaggcaattttaaaaactggcaaaaataatcagggtcaacatttttagaacttgaaaaattagccaaatgctttgaggaatccacaaagtgtttattcaaaaaacaaacaaaaaaggtggaagtttggtaagaactgtaagtggctgtactaatttatagtcccacgaacagtaaatgagcatccttctttatctacatcctcagcagtatctcttattttttctctttgaaaaaaaaattctctaactagggttagagaatatctcattgttttgatctgcatttttctgatgatcagtcatgttaaacctttttcatacacctatttgccatttgcatgtttcctggtgagaaatgtctatttaatcttttgcccagttcttaatcagatttcttttctattggactgtttaagcatctcatatactctggttactaattccttgtcagactgacagtttgcaaatacattattcaactccatggcctgtatcttcagtttggtgatggtcttgtttgctagacagaagctttttagcttaatgtaatcccatttatctgcttttgcttttgcctggattttgaggtcttaaaaataatctttgcccagaccaatgtcctggagggcttcccaaaagtatacttctagtgtcatagttttatatcttagatttaagtctttaagtcattttgatttgatttttgtatatggtaagaaacaaggggttagtttcattcttctgcatatggttatctggtttcctagcaccatttattatagagactgtccttttcccattgtgtatttctagcatccttgtcaaaaatgaattggctcatttgcgtaaatgttgtaaatgcgtgatttacatctgggttctctatgatctttcattagtctatgtttctggttttgtttgtttgtttgtttgtttttgagatggagtctcgccctgtcacccaggttggagtgcaatggtgtgatctcagctcactgcaacctccacctcccaggttcaagagattctcctgcctcagactccctagtagctgggattacaggtgtgcaccaccacactaatttttgttatctttagtagagacagggtttcaccatgttggccaggctagtctcaaactcctgacctcgtgatccacccacttcagcctcccaaagtgctgggattacaggcatgagccaccgcacccagccaatgtttctgtttttatgccaggttcatgttgatttggttactatagcgttgtagtaaatttggaagtcatatagtgtgatgtctccaagctttgttcattttgctcaggattgctttggctactgggttttttgtggttctatatcaatttcaggatttgctttctatttatgtgagaaacatgagtattttgatagggagtgaaatggatttataaattgttttgggtaatattgttatgtgaatcaaattaatttttctaattaatgagtatgaaatagttttccttttttctgtcctcttcaatttctttcatcaatgttttacagtttttcttgtatacatcttttacttctttggttacattgattcctaggtgtttcatattctctgtagctgttgtaaatggtaatttttttatttctttttcagatcattctctgttggcatatataaatgctactgatttttgtatgtttattttccatcttgcaactttactgcattcatttatctgttctaagagttttttcatggcatcttcagggtctttttcaagtataacattatgtcatctgcaaacaatgataattcagcttcttcctttccaatttggaatactctttaattctcttgcttaattgctcttgctaagactttcagtactatgttgaataaaagtggtgaaagtaggcatcctagtcttgctccagatcccagaggaaaggctttccatttttctcccttgagtaagacgctagttgtcgtttgccatatatggctcttattattcttaagtatgctcattctatacccagtttgtggagggattttatcttaaagagatgtggaatttcatagaattttttttagcatttatttaaatgatcatatgttttttgttctcgcttacttatgtaattattgatttgtatatgttgagccatccttgcatccctgaaatgaatcccagttgattatggtgtaagatctttttaatgtgttgttgaaatttgtttgctagtatttcgttgaagatttttgcatctatgtttatcagtgatactgctctgtagtattctctttttgtgtgtccttgtctggtttgggtatcaaaataatgttggcctggtagaaggagttgggaaatactcactctacttcaattttttaaaagagtttgagaagaattggtataatctcttttttaaatatttggtagaattcaacaataaagccataaggtcttcctttgatgggaaaatttttattatgacttcaatcataataaaggtactcataataatattattcgctattggtttgttgaggttttctatttcttcatggttcaaacttgtaggttgcatgagctcaggaatttattcatttcttctaagttttcaatttactaatttatagatgtttgtaatagtctctaatgattatttgtatttctgtggtctcagtttttatgactccttttttggtttctgattttatttaggtcttctctctttcttattctggctaaaggtttgttgaatttgtcttttcaaaaaacaacttttttaaattgatcttctgtgttatttttagtctaatttttattcatttctgctaagatttttgtcatttgttttcatttactcactttgggttttgtttattcttgcttttctagttccttaaggtgcattgttagattgtttattttgtttctgatttctgtagctgggcatatatacatttataattgttataacttcctgatgagttgaatcactcatcattttataatgtctttgacttcagtaacaaatttggcttaaaatatatgtgtctgtattagtatatctagctctattttggctactcatggcatatccccttccttcactttaatttcaacgtattgtgtctttgaatataaagtatctcttttagagagcatgtagttaacctacttttatccattctgccaatctctaaatttttaatttttgtaatatttttattaaatgtaattatgatgatataattaaaaataaccaggataaattcaacaggataaaatcaaaactacttggaatggcatattgatcaattaaaatctatatttcatacattctgttttatttcctttttattttttttccttgggttataatgcacataaaataaaatttgatctcttaattattttacatatatcatttagtggtgtcgattacatttgcaatgctatgcaaccatcatcattatttgcaaaactttttatcatcccagggagaaattctcaactcagatagaaactcattaagcaaggtgagtgctcttgttaaaaatcgattttccatagatgtagaggtttatttctgaactctcaattttattccattggcctgtatgtttatccatgtgccaggatcatactgatttgattacctggctttgtagtaattgggtagtgtgagttctttcaatttgttcttttatttttcaacgtttcccttcatttgctttcaccccagtctatggtagcctctcctctattttatgtccctataatatatattttatataggtggaatcatacaatattaatacttttatgtctggctcatttcactcagcataatgttttcaaggttaatccatgttttagcatgcatcagaacatttatttctattgctgaataatattttattgcagttatatagaatatattgtttatccattcatctgtggatagttacttgggttgctttcaccatttgacaattatgaataataaatattggtatacaagtacctgcgtgagattttgttttccattcttttggtcatatgcctaagagagaagttgctgggtcatatgggagttctattattaacatcttggaaaactgccaaacttttctacagcatctgccctattttacattcccatcatcaatgtctgagggttacaatatctccacattctcaccaagatttattatttttctttttttaaaaaattatataattatcctggtagatagaagtaacaactcactgtggcttttatttgaatttccctaatggctaaaaatgttggacgtcttttttgtgtgcttattagtcatttgtataacttatttgagaaacacctattcagacggagtttcgctcttgtcgcccaggctggagtgcaatagtgcgatcttggctcactgtaacctccgccttccaggtttaagcgattctcctgcctcagcctcccaagtagctgggattacagatacccaccacttcgcccgacaaatttttgtacttttagtagagacggagtttcaccacgtttgccaggctcatctcaatctcccgacctcaagtgattcacccgcctcggcctctcgaagtgctgggattccaggcttgagccaccgcgcccggatggttgtatgcatttctgttgctaagttgtaggtcttccttgtagattctgattattaaacccctattagatatatagtttgcaaatattttatccacttctatacgttatttcactttataatgtcctttgataaacaatatatttaaattttgatgaatttcaatttgtctaacttttcttttgttgctcattattttagttttacacaaaaatagattaaatgccaaatttaaaaatcatgtagatttactcatgttttcttctaagcatgctataagtttagctcttatattgggtcaatgaatcatgttgaagtaatttgttatatggcataaaacgcagacccaattttattcttttaaatgtagaaatacagttgtcccacaccattgttgataagactgttcttttccccatagaatacacctggtgctcttattaaaaatcagtgttccatagatgtacgggtttatttctggactctatttaattctattggcttgtatgtttatccatttgccagggccatactgatttgaccatctagctttgcagtaattgggaagtgtgagtcctttcattttgttattttctttttcagcattgtttggagtattcagatccctttgcaactccatatgagtttgaggactggctttttcatttctgcaaaggggctgttggaattttgataagaattgctttgaacttgtagatcactttgggtagaattagaaacataacaatactaagtctcccaatattttcatttatgtaggtcttctttaacttttttagcaatgttttgtagttttcagtgtacaagtctttcacttccttgttcaaatttgttcctaggtattttattctttgagataatattatacattggaatgctttattaattacttttttctatttgtattcataggaaatattggtctgtaactttctgttctttggatttctccatctgactttggtataaggataatgcttgtctcatgtaatgacttaagaaatgctccttcttctattttttggaagaatttaagatgaattggtgtttattcttttttacatgtttgacagaattcaccagtgaaacatctgatactgggcttttgttgttgttgaggaggagttttgattgccggtctattctccgtacttgttataggtctgttaagaatttcttcttcttcttgaatcacattaggtaatttttgcgtggctaaaaatttgtccatttcatctaggttatctaattttgaggtgtacagtccatttcacctaggctgtctaactttggggtgttcatagtatttcttcacatttctttctgtcgttagagacaagtataattaatacgtataaaatatggtattctcctatttccacaatgatcaagaacaaattcttcaattttatgtttttattatgtcctctctcccgaacttcactcctatcattttcctttcttgggaatcttggtgaaggaattttgcaaacaacatcaaatttcagaatctgattttggaaattgttgacaagattctggctagtttcagacatctgaaagctttgttgaaaactagaaaagaactagaaaatgaattcacttcattcattgaagtaaagaataagcattgaatatgactttgtgtgattttatggttcttaagttgtgtccaatttcagaaaagaaaaaataagtctctttcctgatgtacttcatgctgctttgatgaccactgccttggtttatgcatttttcttcatatgaatttcagcagtgacctttttatggatatgttgttattattagtagtagtagtatcatcacttaagacggagttttgatcttgtttcccaggctggagtgcaatggtgtgatcttggctcactgcaacctccacctgccgggttcaagtgattctcctgctgcagcctccctagcagttgggattacaggtgcccaccaccacgcccagctaaatttttgtagttttaatagagactgggtttcactatgttgaccaggctggtctcaaactcctaacctcaggtgatccacccacctcatcctcccaaagtgctgggattacaggcgtaggccaccacccagggcttatgggtccattattaacagttgctttatatttccatttttcagtcaaataaggacttactattcgacaagcattgtttacatatgtaaacatatatatataaattaaaattctaagcaatgttcacacacatgcatacacacataaacatacacatacacacacatatacacactgagaacgtactatccaccaggaatggtcctaattgacataccaaagatatataaaaattaagttgatcttcacaacaatcaaatgggtgggtaccattattatcctattatgtggatgagtaaagaaactggactcagagagataacttgctcaagtttgcacagctattgaaagagatttgcctgatttcaaacccagttaggcttattcttcatcttaggcactacataggtaagttgtgtgtacaaatattggcattgttttaaattgcaaataattagcgaattgatctgaaattagccaaacggtttgaaaattaatataggataagtatccttcatctgaaatgctaaggaacggaagtgttttggattttagggttttttggattttgaaatatttgcattattctgtttgagcatcccaaatctgaaatactttaagcattttactcagcattttgtttgagcatcacttcaatactcaaaagttttaaactgagcattcagaattaccaattttcaaatctaggatgttcaacctgtatctcagtatgatatattcaaattttacaatatttgctggctacaaatacaatacaaaacattatgttcaatccaaaacattctgtgttgaaaaatatttaatattctagagagtattaaaaataatgttataacaatcggtaaaagaattacactatatgtgaatgctgaatgagtctaaaataccaatgataaaacaaaatatttaaattggttaactcccattaaaactgtggttgtggctgggcacagtggctctcgcctgtaatcctagaactttgggaggccaagtcgggtggatcacctgaggtcaggagtttatgaccatcctggccaacatggcaaaaccccgtctctactaaaaatataaaaattagtcaggcatggtagcatgcagctgtagtcccacctacccaggaggctgaggcaggaggatcacttgatcctgggaagtggaggttgcagtgagctgagaccacaccactgcattccacattccagcctgagcaacaaggtgagactccatctaaaaaaaaaacaaaaacaaacaaacaaacaaaaaaactgtgggtgatttattttttcactttccttttggataggacacactagaaatactgaggttggtaatgaaaagataaacttttttacagcgttttttcttgggaagacagctcagagtagggaactctgagcaacacatatgtaaaaccatagacttgatgaaattttcatcatggtcttcaccatttcacctgtcatccacctaatattgttctagaaggaatatgtaatgaatgattgaactttcctttgcatatttgtacccgccattgtttctaagaaataaagccacattgcagcactaactaattaaagagaatgaatgacaaggatttctagaaaagaatgttgccaaatctctgcatataagtgaagtgcctgcctaggtttctttgtgattctcttggtatacatgaattcagaaggtggtaagtcttttattatctagttatatcataaaaatgataaaatacttcataagatttaaatgtctaaatgcacagaatatgcttttaaattaattatcctcacatgaccgttggaggaatatccagtaaaattatcggaaaccaaaattcttacacagcagttcgagaaatgaaatagaaaagtgttgtgaaagagagtagcaaatggaacatgtgccaagtgggcaaaatgagggtctaagtcaacatattttacgccagaattttctcctcaccacatttcttctcattctggtcattggcagtctgtgacaacaatacttcctgaaaatgtgttgcagctgtagagtaattccatagcagatttattttcctttggcactttttgtaattggcattgaggaaacatacaagaattattccttatcttttttatgttggcaagtttcatattgtttaaacaatttttttagttgtgtaaaatatcatttggtagaatattagaagatgtttgggctttcaagtttgttgatttgagtcagaggtatattgaccagttttagcacaagatagaatttaattatcttggctacttaggaaaaaatacacacagagatgcatacacacagacaagcaaatatcttcaatagtataatatctaatgtatatgttttccttagagccttaactgaaacatacatgctaaattttatacagatattttatctcaatatacacaagttacatatgtggatataatatgaagttgaaaatcctgaagataatcatatgtgatgagtttactgttaagatcagaaaatatgaatgttctgaactccacaaaaacttggcaaatataattataaaaaacgcaaaaatattcaaaagtgtatttactaaacctgtattactgttgtttttattctttttattgatatatatcatagttgtatatattttggggctacatgggatagtttgatacatgtatgtaatatgaaatgatcaaatcagggttactgggtaatctattttttccttgtattgggaacactatagttcttttctagctattttgaaatatacaataaaatattaacaataaattagaacttactatttctgtccaactgtgttatttaccattaactaattctttttcatcctccctacccctctcacactttgataaccaccattctattctctacctcaaggaaatccactttctttgctcccccatatgagtgagaacatggaatgtttgtctttctgtgcctgggttatttcacttaacataatgacctccagttctgtttatgttgctgcaaatgacaagatttcatttttttatggctaaatagtggccagcaagaatacaaaaatagtgctcactattactattcatcagggaaatgcgaatcaaaaccacaatgagatatcaactcatcccagttagaatggctattgttaaaaagaaataaatagaaaatgttagctaggttgcaaagaaaggggaacgttcatacactgttatgggaatgtaaagtagtacagccatatggaagacagtacagaaattcctcaaaaacaaaacaaaacaagacaaaacaaaacaagacaaaacaaaacaaaaaagcctgtaatcccagcactttgggagatgaaggctggcagatcacttgaggttaggaattcaagaccagcctggtcaacatgatgaaacactatctctactaaaaatacaaaaattagcttggcgtggtagtgcatgcctgtaatcccagctacttggaaagctgaggcaggagaattgcttgaaaccgggaggtggaggttacagtgagccgaaatcatgctaatgctctccagcctgagtgacagagcaagactctgtctcaaaaaaaaaaaaaaaaaaaaagagctacgatgtaatccatcaatcccattactggctatatatccaaaaaggggaaattagtatattaaagagatatctgcactcccatgttcattgcagcaatattcacaatagtgaagctatggaatcaacctaagtgcccatcaacagataaatggataaagagtatctatatgtatatgagtacatatatgaaaaaatatatatgcatactaaactttgtaaggaattagtatagttttaggcttacagaaaaactgtgagggtgacaaagttttcatgtgcaccacaccgagtttttattgttgcaaacattatacattagtatggtaacattttttacaattaataaacaaatacaagtatattattttaacagcagtctacactttattcaggtttccttggctttcgatttctgtcccaggatcccatcaagaataaaattacatttttctgtcatgtctccttaggctactgtgggccatgacaatttcttagaggtttcctgtttttgatgattgatatggtttgactgtgtccccacccaaatcgcaacttgaattgtatcagtagagtggagtgttgctgaaaagatacccaaaatatgtaagcgactttggaactgcataacaggcagaggttggaacagtttggagggctcagaagaagacaggaaaatgtgggaaagtttggaaaggcatgattggttctgaaatgtgaggacatgagatttctaggtgtcggggtggaatgatatggtttggctgtgttcccatccaaatcacttgttgaatggctttgataaaatgctgatagtgatatgaacaataaggtccaggctgaggtggcctaagatggagatgaagaacttgtagggaactggagcaaaggtgattcttgttatgttttagcaaagagactagtagcactttgtccctgctctagagatctgtggaacattgaacttgagatcatttaagatacctggcagaagaaatttctaagcagcaaagcattcaaaaggtgacttgggttgctgttaaaagcattttgtttggaaagggaaacagcattaaagttcagaaagtttgcagcctgatgatgcagtagaaaagaaaaacccatttttttttgtggagaaattcaagccagctgcagaaatttgcgtaagtagcaaggaagctaatgttaatccccaagaccatggggaagatgtctccaggccatgtcagagactcagagaccttcagggcagcccctcccttcataagcccagaggcccaggaggaaaaagtgtctttgtgggccaggcccagggtctgcatgctctgtgaagcctagggacttggtaccttgtgtcccagctgcttcagacatggctccaaagggccaatgtagagcttgggctgtgacttcagagggtggaagccctaagcctttgcagtttgcacgtggtgttgagcctgtaggtgcacagaagtcaagaattgaggtttgggaacctccatctagatttcagaagatgtatggaaactcctggatgcccaggcaagtttgctgcaggggtggggccctcagggagaacctctgctagggcactgtggaagggaaatgtggggctggagcccccacacagagtccctacttgggcactgcctagtggagctgtgagaagagggctaccgtcctccagaccccagaatggtatatccaccgacagcttgaaccatgctcctggaaaagccacagacactcaacgccagcccatgaaagtagctgggagggaggctgtaccctgcaaagccacaaaggtggaactgcccaagaccatgagaatccacctcttgcatcagcaaaacctggatgtgagaactagagtcaaaggagatcattttgaagctttaaaatttgacttccccactggattttggacttgcatggggcctgtaacccctttgttttggccaatttctcctatttaaacagctatatttacccaatacctgtacccccattgtatctaggaagtaactagcttgattttgattttacaggctcataggtggaagggacttgccttgtctcagatgagactttggactgtgcacttttgagttcatgctggaatgagttaagactttgaaggactgttgggaaggcatggttggtttgaaatgtgaggacacgagattttgaggggtcggggtggaatgatatggtttggctgtgtccccatccaaatcacaacttgaattgtatctctcagaattcccacatgttgtggagggggactcagggggaggtaattgaatcatgggagaacagtcgtttccatgctattctcatgatagtgaataagtctcacactatccaatggttttatcaggggtttcccctttgcttgctcctcattttctcttgctgctgccatgtaagaagtgccttttgcctcctgccatgattctgaggcctccctagccatgtggagttgtaagttcaattaaacctctttttcttccttggtgtatgtctttatcagcagtgagtaaacagactaatgcaacgacctgagaattttgagggggtactcatcatgtactttgcagaatcaatcaggttttctctaatgcttttctcatcataagacataggttattggtttttaaaaggaagaccacaaggtaaagtgcaattctcatcacattatgttaaaagtagatactataagcataatctaccactgattttattgtgtatgtttaaactgtacaacatgtcttgatatacttatacatagtgaaataattagcataatgaagcaaattaatgtatctatcactttacattgtttttgcgtgtgagataagagcacctaaaatgtattactgttgatgttaatcttgatcacgtagctgatagagtttgtcattttccttgaccataaacttacttttttccccctttctacactgtagtctttgggaggaagtcactgcacagcctacatttaaagaatgagggcttattctctacctccttgagagcagagtgtaatgtagatactcatctatgttacttttactctttatgtaaattacttcgaaattttctgcatcagagatttgtctcttctctcctatttgtttattcatttatttatattgcaacatatttgtatggactcacaaatatattttttaagctggggtttatattcagtatttaacactattttgtttttcaaagtgttctagcttttgccattgggagctattttagttggctcctgtgtcttttgtgtgtctttgacacaattctatctttgtgagtatttttgtttgtttgttttggttttttgcacttgcttgccttctgcccctataaggtattccaagcacatctcctatatttcttgactcactcctagaaccagccatttcgccaaagattcatggttccttttaacagagaataatattaggaaccaagatctaagtgctaagtgggcttattgctacttcagtgttgatgcttccagactatctcaactgacagagaaaaaaaatgtgtgagtatattaacccatgtatatacacatatttataaatgttatctatatttctatatccagaaatatctatattaagcaaaatgtaagttcatactggtgtattgaagtcttctgtaataacacatggataattctagccgcatctccttggtcactgcaatctctcattccaaaagtaagaaaactgcctgtcagccactgtcagccaatcatttatatacttgttcaaatccattatgtttgtatagtggtatgaggattgttaatccatacccctaggtaaacaggtttttcaactagaatatagtgcttatgtacagtttcttttgcctttactattacagactcatctccatttattttcgaagttacttatgtcaccactgttattgtccactcccttcagataagatttttcatacattcttaatacagttagatattttttgtctcagcctgaattccgtcttggagtctcctgacctctaaatgacttttgtttgctttgttgaagatcagttggctgtaagttttggggtttatttctggcttctctcttctgttccattggtctatatgcctgtttttgaacaagtaccatgctgttttggtgactatggccttatagtacagtttgaaatcaggtagtgcatgcctccagatttgctctttttgcttagtcttgctttcgctatgtggatcttttttggctccatatgattgtagaattgttttttcaaattctgtgaagaacaatggtggtattttgatggggattgcattgaatttgtagatagcttttggcagtatggtcattttcacaatattgattctacctatccatgagcatgagatgtgtttccatttgtttgtgtcatctatgatttctttcagccatgttttgtagttttccttgtagaggtcttttggcacctggttatgtatattcctaagtttttcgtttgtttgttttttgcagctattgtgaaaggggttgagttcttgatttcaacctccacttggtcactgttggtatacagaagagctactgacgtgtgtacattaatcttttatctagaaactttgctgaattctttcatcagttctaggagctttctggaggagtccttagggttttcaaggtaaacgatcatatcatcagcaaagagtgacagtttgacttcctctttactgatttggatgaactttatttctttctcttgcgtgactgctgtggttaggacttccagtactatgttgaaaaggagtggtgacagtagtcatccttgtcttgttccatttctcagagggaatgctttcaaattttccccattcagtattacactggctgtgggtttgtcatagttggcttttattacattaaggtatgtcccttgtatgccgattttgctgagagttttaatcataaagtgatgctagattttgtcgaaggctttttctgtgtctattgagatgatcatagtgatttttgttttaaattctgtttatgtgttgtatcatatgttaaaccatccctggtatgaaactcacttgatcatggattacttttttgatatgttgttggattcagttagctagtattttgttaaggattttagcatctgtgttcattgaggatattggtctgtagttttcttttctggttatgtcctttcctggttttggtattagggtgatgctggcttcatagaatgaattagggagggttccttctttctctgtcttgtggaatagtgtcaaaaggattggtaccaattcttctttgaatgtctggtagaattttgttgtgaatctgtctggtcctggacattttttgttagtaatttttagattaccatttcaatattgctgcttgttattggtcagttcagggtatctaattcttcctcatttaagctaggaagcttgttttttccaggaatttatccatctcttctaggttttctagtttacatgcataaaggtgttaatagtagccctgacttatcttttctatttcagtggtgtcagttctgatatctcctgtttcatttcttagtgaggttttttggattttctctcttcttttcttggttaatcttgctaatagtttgtcaactttatttatcttttcaaagaaccagctttttattttgtttatcttttgtatattttttgtttcagtttcatttagttgtgctctgatcttggttatttcctttcttctacttgctttgggtttggtttgttcttgtttctctagttctttgagatgtgaccttagattgtctgtttgtgctctttcaaactttttgatgtagatgtttatggctatgagctttcttcttagcattacctttgctgtatcccagaggttttgataaattgtgtcattcttgtcattcagttggaagaattttttaatttccatcctgagtttgtgtttgacccgatgctcattcaggagcaggttatttaattttcatttatttgcatggttttgaaggttccttttggagttgatttccagttttattccactgtggtctgacagagtgcttaatatattatcacttttcttaaatgtaatgaggctcgttttatggcctataatatagtcaatacgggagaaagttccacacgctgtttaatagaatgtgtattctgtggttgttggatgaaatgttctgtgtatatctgttaagtccatttgttccgaggtatagtttaaacctgttgtttctttgttgactttctgtcttgatgacctacctagtgctgtcagtggagtattgacatcccctactattgttgtgttgctatatatctcatctcatttcttaggtctattagtaattgttttattaatttcagagctccagtgttaggtgcatatgtttaggattgtgatattttcctgttggacaaggccttttagcattcttttttttttttttttttttttagaccgagtctcgctctgtcacccaggctggcgtgcagtggcgtgatctcggctcactgcaagctccgcctcctgggttcacgccattctcctgcctcagcctcctaagtagctgggactacaggtgcccacaaccatgcccggcatgctccccttcccttaagggtttgagtatctgtggtggccaaacagacaagccaatccctgtcacatgtcctgcaagggaggtcagggaactctcccatttcactaccagaagaatttactgcttgttccagtcaatacctaactatagggcgctgacctcccttatttatttttgacagcttacaattgtcaattatttctctgaccctttaaaaggtagtcttcccttaagagaaggggagcatgcagacggacaggtgcaggagccagaatgagtgcccctggtctccagccccacagcagcgtccaggagtgggtgcctgcagctccgaaatcacaatggggtgaatgttacagtgcactctcttagatttaccatctacggatggcttaagtgttaaccagctcaatgccctcttggtatccaggtccttgtctgacatccaggaagaatcaggtcacacaaggacttgaaggatgaatgcaggaatgcaggggttttattaagtggtggaggtggctctcagcaggatgaatggggaactgaaaaagggatggagtgggaagatgatattcccctggagttgacagtccagcagctgatctcctctctgactgcccccagccgattcctattggcattcaggtgctccttctcttctctctgccccattttcctgccatccttctgctcttctgttagccctctcgtctgcttgtctgcttctggagcctggggtctgagatttatatgggtacagaatagggggttgtggcaggccaaaagacaacttttgggtgccaaaactggaatgtctgttcccatttggggtcacaggtttccaggcttgagggcagggtctttgccagggaaccaccctcttctacccagtatttccctgtctcctatccatatcagtagcactgagatttctaaggctggtattttaaagaggttgaggtaaccctagggacatggtccaggattaccatggctagagtgtgatcaagttttggtgtgctgggttgaacagagactttttcagttctcacccagttcccattatactaaagtttactgtacttatctaccaacttgttgactttcttgtccaacttaacacttggagtgttaagtttgcagaagcatctggaactccaaatagtctttgaggaattttctttctactgatacagtctgtatatctggtgtacccacctactataggttgtgtttcacagggatcatgtgggtttttaggggcatagagctgaaagtgggctcaagtacagagagtcactatttatagcctcaaaccattgtttccttgttagatgtaagatttttccttatgtgtttatttacagactccttcctcatttttttttccttaggaaatttctaactttttttaccttccatgctttctattggatgcattcctttgtttattttttttaatattattttagttttttgagacggggtctcactctgttgcccaggctggggggcattggcgcaattttgtctcactgcaagctctacctcccagttcatgccattctcctgtctcagcctcctgagtagctgggactacaggcacccaccactatgcttaattttctgtatttttagtagaggtggggtttcaccatcttggccaggatggtttcaatctcctgacctcgtgatccacccgcctgggcctcccaaagtgcaaggattacaggcataagccaccgggcccagccacattcctttatttctatcagacagaccactgtatgttagaaagaaccttaattttggataagatttttacctttcatgggctaaaagtctccattaaagaaaattaatagataaatatattaacatcttggtattagtttatttgaacctgagctcatacttgatcagtgttttcagcaatatttaattctgcttttgtaggtttcacattctacttgcaaaataatggatgattattaccttattattatgatgatgtttgtgagtgaattttcaggcatttttattggaatttgtgatcacattgagagccataaaacattttacatttttcagatagaaataatagtacagggctgggtgccatggctcatgcttgtaatcccagctctttgggaggccaagatgggcggatcacctgaggtcaggagttcaagaccagcctccccaacatggtgaagccctatctctactaaaaatacaaaaattaaccaggcatggtggcgcacacttgtagtcccagctactagcaaggctgaagctggatgatatcttgaacccgggaggcagaggatacagtaagccgagactgtgccactgcgctccagcctaggagacagatggagaccctgtatcaaaaaagaaaaaaaaaacagtgaagtgatagtggaacccacttctgaaagagatcctgttgcatccttatccctctcttagttctctcatatatgcaatggggagtctctgttaagttttttgatttatgaaatgatacacaatgccaggaatgacactaattaaaatctgtatatttactcatttgaatcttgacaatcattcttatttagatgaacctcagtcaaatagttaatatttaacatgttttcttcaggaatttttattagcaatgagaatgttaattgaggatggctgggctgatattctgtaagaattgtacccttttattgaatatttaaactaagtttaagtatatataaaagatcagatattgcaacatgtttctggtattaatttccaaaaaactttttatacgtgaaattatgaaatggtacttcctatagtctagtactaaaaatttaaaaaagtcttttatcattcttactgcataaaaatgctttagtgagtattgttaagaagaataaaccaatccactttagttttcttatccccgtgactcatttatgaacttgatatttctcagtgtagccctacaacaatgtctttaaattatgtaattttctatgaattcaacaaaagaaacctaaaagttgactctgagcattttcttggccttcctcattttgcggttgattgtggcctacataatttccctgaaatgagtcagcttccaaacagtttaggattccaagccctctatataggctgctgctcaatacctgttctttgctcatttctactgccaatatattttgttataaaaatgaaccacattttttggccaataataatatgtttgctataaaggttatattgcaaatttcactaggttccataaagaaccttatcatcaccattgctgtttctctaaataaatatatgcatgaaaattgtgtagagggagaaagttttaaaacattaattatgtatatagaaagttccaactgatatctagcagaaacatgaataatttttcagtttcattcacctagtgtgcaaactaggatcaatcataatgaaaaaaaaaccctcccccaaaacagctacagcttcatttttctcttcttctctgtaatgaaggctccaagttgacatagatggtaataacaaagaggccagttctgagagctgccatctgcatcatcctgacccctttcaacacacctcatctgaaacgataactataattcctgtcctacattacactctgctgtagtgccacacatcttttaaaagtattaaggaaaccattcagagagcattattggaaaataagagagggcaactattctggtcaaccaagtaatgagttttaatacttcccagcagttacctaaaatcccagctgatttcaaagactaagaggtaaaagggaaaaggctcaatggcagagtggggaagagctggggagaaatcctttagagctaatatgttatctggcagtgttatcttcctccacttttatctgcagtatttcaacatacataaatctattatagtgttggagaaagggcccactgtctgaacttttattcttttaggagaaacatccatgtaaagctcttttgtagattaagcaattcaattttatgcatagagaatacctaaatggccaaaaaaattctattctacttaaaactataccataattaaaaaatagtaaatagcaatagcactttaaaataaatttaatcaatgaatattccttgtccatttgtataaaatacttaaataaaaagttttgtaaaatgttatgatatttatctgctttaaaatattttactattaactcaaacttttaccctaggactgattcatagttacacaacttcaatgttgaagtaaaatcctacggcctatcatgtgaatttatacaaatcatgtatgtagtatgtaggttttttttctttttcaaattaagaatatcagaaaatacaaaacaaaattttatttattattcattatttcagatctgcagtaaacagaatcctgctcagataatttgagaaatttttcaagtaagagtatgaatgaacgaatgtcgagacatctagagattagcagctgtgggaagtcattgccagctctaagctgaagagcaaaggaggtaatagcactacaggatctgaagagtaatagagccttaaggtagtggtcttcctcattggaactgcagtcattgaaggtatcaaccactgacagacaatgctgccaaatatgatagggagtggggaacaaataccccaaccttccctcttgccttgtgattggcatgccattgctccccatttcctgaacccagcaatctgaagccaaatggaaagaaagtcagtaacacaatccaagggagtcagcctctcagaacagaaaaaagaacatgaaaagacaaagacttgattgaggtcagaaggcaaaataagaaacccaacacatccatattcccaacacaaaggcttgaccacaaagaattaatagctggtaaattttgcctacagctatttaacaaaaaataaatatcactctatttctatatgcatggtaaattcctgcatataccatgcatatggattttcaaagatgtaaaaaatgcataaaatcacaaataggaagaaacaattattccaaatatttacacatgaaagtaagcatcactgtgatggttaatattgagtgtcaacttgattggattgaaggatacgaagtattattcctgggtgtgtctgtgagggggttaccaaaggagattaacacttgagtcaatggactaggagagacagacccaccctcaatctgggtgggcaccgtctaaccagctgccagcacagctaggataaaagcaggcacagaacatgaaaggactagtctggctaagttatctgggctccatctttctcctgtgctggaggcttcctgcccttgaacatcagatcccaagttattcagcttttggactcgtgcacatacctcagcgatttgccaggtgttctcaggccttcagccacagactgaaggctgcactgccggcttctctacttttgaggttttgggactttgacttgcttcctggctcctcaacttgcagatggcctattatgggacctcaccttgtgattgtgtgggtcaatttccctttaaaactccccttcatatattcatctatcctattagtttcgtttctttagagaaccctgactaatgtaatcattaactatgagtgaacctcatttcagatatttttctatggatatacacatatggaaaaacagacaaagataaactttttgttaataaaaatgagactgtactatataaagctattatagtaaaatcaatggatggatttattttactttaatttataagaataaaatatctgaaataaaacaaaataaaggagttcaaataaatgtttccttaccacagtgctgttttatatttttaaataacctaaagtttagaaaatgttttacgcagattaaaagacatgcattgttaatgtaatcatagttttccatttaaaaaatctattaactttttgctacaaacaaggaagatattagaatgtagcatatttccatctgtcttctgcttatatcccaacgtttgtaaaatatattattctatttacattattcgggtttactttttatattgttacattctgcaaaaatgtttagttctattttcaaggagaataggtttttatcagtgtaggtgttataagactgtctttacttgaattctttgagtcttacattccataaattattagggtctttcatgttttcaaatgtctccatgccttgttgatacttgaaccctaacttagctggctatacaatgattgggtcacatttctttaccttttgaacttttagaagttgcttcattgtctttagccacaacatactgatggctgtggagaaaatatgggactcatctgatttgtcttctctgtttgtattttctttctctgctctagatgcctgatgaatgatacctttaccttgaaatttaatagcctgaaaaggttgtcttgatgttaggtaacatgaattaaaattttatggtacaccatctgcagtttaagttttttacattatttctttttacatctcaattttaagaggtgttgcaaagaaatcactgtaaatacagaagtagccctcatgttccaccaaagtcaattagagtgtttcatggatgtgcatgaaccggtaaatgtcaagaaagttaaaaaactgaacccaggccgggcacagtggctcacgcctgtaatcccagcactttgggaggccgaggccggcagatcatgaggtcaggagatcgagaccatcctggctaacacggtgaaaccccgtctctactaaaaatacaaaaaattagccgggcgtggtggcgggcgcctgtagtcccagctactcgggaggctgaggcaggagaatggcatgaacccgggaggcagagcttgcagtgagccgagatcgcaccactgcactctagcctgggtgactaagagtctgtcaaaaacaaacaaacaaacaaacaaaaaacaaaaaacctgaccccaacaaaggagtcttacaaaaaacaaggaacaaacaaacaaaaatgttacaaccaaacatcagacttttgagtcatgtttcaggccaagaggtgatgagttaccgtagttgcctgagctgggtggtgaactattacctggcaacaaaactgaaatagaaggtggcttagtaaaatacagattcagaatgagtgccttgaggttaaggcatatacgaccaaactgattttctttttcacaaggtcttcaggtaaggccattgtagaagatactttgggaacttcagtaagttgcttcacttgtctcatattttcatcttcaggatggagacttgagattgaattgttgtgcaattaggtaaatttttacccattttaaatataatattaaaatattaattacaaattaccttatttgaatctggaataatatttattgcagggcatataatctaagctataaatgtcctgttagaagagaacatattcatcttgctaaggtatatgctatatgactggcactgtgctcaactcagagtcactgaatgaacagtatttatttaatatatgaatgagagcacttcaagtatatagaaagatatctcaaaagcttcagccttacattgctcataacttcatttcagtgacttagatgaaaacctcctgaacatttttatcaattttatggataccccaaatcataagggaatgtatatatcaattagatgatgaaatggggatgcaactacgtcatggcaggctaaagaaatagaatgactttgacaagaggaaattacatagaggcacctgagtctcccaaaccaatttcaaaggtatgagaggggggtgatataaataaatagttgatagatgaaaaaactcagaagttatagttgacaacaattttaatataatatgaaaaatgtggttggacttctgggaaaaaaaactaataaaatctaatggaaattggtggtccactcatttctccacctatgatgttaaaaatatttcttctgggtatgacatcccaaaagaggtgtaggccttcgaaatcatgctcagaaggaagatatcagaggggttaaaggaaatttgatgccaggtgtaaaatgtatttcaaagaactgaacatgtgacactaagtaaaattctactgggtaaaggccaaatatctccaaacatatgaagaggtgtcatgtaaaaagatattacatgtgatctctgtagccccaggggttcctgctgatctaggacatatgtactgaagttatgaacagaaatttaaaaatcagagaatcctaaacatgagaagcatcacgtggatggctctgatgtgtaaatcgtcatcactggaagtgttcgaacggggcagaataacccccttaaaaggcttttaataaagttatcaaaaattgtataaataatacaattattttgaagtcctttctaaactaaaattatataactattaatacatcatttcttccatttttttaagaatgtgaaaaataatttaacctaggctacctaggtgtaaatcacgtttctaccagtccttagttgtacaatattggacaaagtatgtaaattgttagcgtttatgtttcttcacctgtaaaatgacaataaatgggttattgaggctatcacatgaattaatacctggaaggtacagtgactgtcagagtaaaaatgcacatgcaacaaaactagtttttaatattttgtggaaaacattgaaaaatttgactcagcactactgttcaatccctgcagaaaactagattgccagtggaagagtcttgagagggacaaaatgccgaaggacaaagatgagcaaactcagtcacctgacaataaccacagcacctcaatttgagctatgcctgttatatagtgtctcatagtcactggtccatagtaagtataaaaaaattgcgatcaagtgaatatatacattaattaatatcaggcttctctataaaatttaattcttatgaaatgtgtctggtgctgaaatacattataaaaatatcccactaatcttagttcaatagtttgttcatcagaaatatcattaagatatccgttggtaataattagtaataagacttgatgcagacttagtgcagaaccagggccatgaacccttatgatgaatgaagaaaggtatcatatctttccacccctacatcccattgatgacagttgacaaagtaaagagtaaaactgaatatacggtggtcctctagctagtgtccctggggtcaggtccctggagtatgtggatccttctcgatttcacccctgattttacacttctcaccattttgcattcgttgaaattcttgtcttttagtgttgatgtcaaagatctctctctctctctttgtgtttatgtcaaagatctttctctctgtccatctctctctcacacacacacagaaacacccacaccactcttacttttcattcttatatttaacttttattttcatcaaaatatgtacatagttttgagttagatttagattttttccataaaacaggattatcccaattcaatcccatctttttttttccccactttcaatcatgttaactattttgatatttaccttcagaagtcaaacaacataacttagcatcatatgtttcctcccattttggaaagtgaagatttatctctcaactctctattcagttctcattttgggattttctgtaagcataattctagcattattttaatgtatgtttaaacaaggtagaatctttttgtgtttgttcactgatgtatctaaagcattcccagcagtaaagataggtataagaaagatatttaataaataatttttgaactgatgaatgaatcctgacttttcttgtcttttacttcttttatttgactatcttgttcatttagcctatgtcttcctcttccttgttttattcccttcattggccgaacacaacccccaaaagctttaaaagaaagagtgtatacatggtttttaattttgtttttgtgtttaaaacattaaatgtatcaaaattcttttattctatatttaaacttgaataattctttatctaggtataggattctaggttggaaatcatattcccttagaattttgtagttattgatctattgtttttaaatatcttcactgtactttcacttttggtgagagcttggcagggtttggaaatatagattgaaagtaaatttcccctatgataggagtatttgctttattgtattctagttttagcatttaggtaaaaatgccaatggcagtcatcattgaccttgtatgtgtttgttctttttctctggaagctatggactcttctattttctctagtgttccaaggccttaaaaacctttgtcttagtctgcatttattttttaaccattgtactggttaaaatggacccttttaatctgaacagttctatgtgcccaattctcagaaagtttcttcaattgactggatgattttctctcttcatttttctctaccaaattatttggatattgaatctactacactgagtcattccaaaattacaattctttacctttgatttttaagtccttccagtttgtactgtatgttgtatgaggttttctcaagtttaccttccaatctttgtattaattgttttatttctacctgtccaattctcaggaactttcttcaattgactgaatgatttcctctcttcatttttctctatcaaattacttggatattgaatctactggattgattgattctaacattataattctttacctttgatttttaaatccttccagtttatactgtatgttgtttatcttctaatctttttattgattgtttcctttctattatagatgccatttctgagaccttttctattctctggtgtttgtatcatcctcttcttgttttatggatgcattatcttctcttctctctctgaggtgattaaatggctaaaacgcaaaactttggggaagacttgcacgagtctttcaggtagattagttgctttctctgatgggtatccaaagatatgtgattatatctatctgttttatgtatgttctattataattttcccattatttaatgttatctataaattcccaagctgtaaatcttagtagaactcacattatatttatatgtgttcctcaccatactctaaaatgctcaagtcataagctttcttaatcttttttgaataaggaatggaaaaattcacacaaaatacatacttgcttttaccttgtttataattctatctttagcagtcagcaaagtgcatgttatgctttatattctcaggatacaacttaccaacaaattgatggaatttgaaagattttttttttgcttataaaacattttggtggccctaaattttcaagcatgtgctttgtacttaggaagcaattcacccatttatttggcaacagtatttctttcgtatctacttggtgctatggagaagtaaattaaaacaaagtttaaaaaatcttctcaatttaattatccaattacttagttcattatgaatatgtgcaaatccgaattgaataaataaacaattccatgaggacagaggctctgctattttacttgtaattacacttatagctctcatggcatctatttattgtcagacattgtttttctatgtagatacagtctagagtagataattattagatgcagccaaaatttaaaaagaaattaaagaaaccttgttttaagctgaagattgcacaaattacttcttctctaaatactgtctgatacccaccattctacataaataatttttacatagttgctcattgcctaaaaaaaaatgtttgcccctgtgagacatcgatgcatcaatagtgcttcattataatgacagcttcaagccacagtatttttccgcacttttttagttctacgctctcttaaaactagtctacctaggccaggtgtggtggctcacacctgtaatcccagcactttaggaagccaagggcaggcagatcacaaggtcgggagatcgagaccatcctggctaacactgtgaaaccctgtctctaccaaaaatacaaaaaattagccgggcatggtgggggggcgcctgtagtcccagctactcgggaggctgagctgggagaatggcctgaacccaggaggcagagcttgcagtgagctgagatcgcaccattgcactccagcctgggtgacagagcaagactatgtctcaaaacaaaacaaaacaaaaaaatctagtctacctcttcccttagaaactttgcatcatttaacaacttgtgttagagagaataatagcctcccaaaaatgcctatgatttagtcaccagaatctattcatctgttaccttacatggaaagcagtactttgtgggtgctattaaattcttgagatggaacaattattctggattatctagatagatacaacctaatgatataatctctttagagcaggaaatctttcctagctgggccagagagcaagatgagacaggaaaaagaaaagagtttcaaagagtgagagggacaagctttgatgttgctagctttgcagatggacgaatagggtgaaaggtgaggaatataggtggttccaggaggtggaaatggccctcacttgagagacagccaaaagatgggagcctctaccctacaccactaaggatatgtactcagccaacagcctaaatgaggaaacaggttttttctagagccttctgagaagaatacagcctgcttgaaacctttgctggattttggataatacatttatgttgttcaagtcattaaattgactgtaatttgttattgcacaatagaaacctaataaacagtctgggcgcagtacctcatgcctgtaatcccagcactttgggaggccgaaacgggtggatcacctgaggtcaggagtttgagaccagcctggccaacgtggtgaaacgccgtctctgctaaaaatacaaaaattagctgggcatggtggcgggtgcctgtaatcccaactactcaggaggctgaggctggagattggtgtgaacctgggaggtggaggttgcagtgagccgaggtcacgccattgtactacagcctgagtgacaggagaaaaactccatctcaaaaaaaagaaagaaagaggaagaaagaaagaaagaaagaaagaaagaaagaaagaaagaaagaaagaaagaaagaaagaaagaaagaaagaaaaaagaaagaaagagagaaagagagaaagagaaagaaagaaagaaagctaataaacaccataacaatgtttctttctctgaattcttttagaacttgctaagcatcctaatgtagttatcaatgaggaatcgtatactgcattgtaagaagatgtgcgaatgttttaaaaaatatatttttacaagtctctagtgtttgagtttattcgggtctattggttcaagggttctagtattaaagtcacaagtgattaagcgccacactacacaattatgtatccattatttagcacagaaatttggaacagaggaggcaagtcagtagaaaattccataaatttgagtactttttatgatttccttaaaaaacagaaaagaaatgaaaataaaatatgcattaactttaagtaaaagaggtataaatgtaatgttactatatatttcatttcttgaataacatatgaaagatttttttaaagtcacatttaagctaagacaattgtctttaaaatagctctgttaaattttggacaaagtgtctttggctttccctcattcttcattttctctttcattttcttttttcatctatcctaagtacagaagtcacaaaatagatagcataaaatatttattgagctcttcaaatatccattcaaaaattctctgataaagacatttttcaaagcaccaccaaacagagataactcaaaggaccagcaagcaatttaaatatctcatgtaatacttaattttaagtatctctatgcatatctattggtctcattattttctgaaagtctgaccccggagctctgatacccaagctcatttgaatctttgtgaatgtatggatttttccttcctcattagagtagaatgtacagatttttctttcctcatgatggttcagctcacttatacctattaaataactggtgagaatgtttttgacttcatctttacccttaaatttaacatttaaatataaatatcagttgcactttaaaaattctcttatccactaagcattcagtttagaaagtgttgtgtacatcatgagaaatagaactgcatgatgtaagatttgtgctttatttagcatgggggataaacgtatttatattacagcgtatatgtttgattttcacaatttttgttttgtccaaattttcacaataaggcccaaaatattcactttttatgttctcttcaatcctctatcttgattctactttgcatccaagtatctgggatgaaaagaaaattagttgaaagttttaggactttaagtgagtagatttttattactgccctgaaaaaaaaattaaaaaggacatgtcatgaaaacaatgggttctagaaaaaaaacaaagctgatatttctaatacagtaagaaaatagatataattatcaactccaaaagaggtcattgtactagcacatcctatggagtggctgggctgttagcagcagaaggcaaccctaatgacaaacatacaaccaaaagccccagacaagcaaactgttgcacacagggcaatgtgtgtgtgtgtgtgtgtgtgtgtgtgtgtgtgtatgcttgcatatatgtttcaactgaaatccacttgtgtttgagcctttgataatattcggactggactttgtgttattaaaatcttgatttcaaagtgtgatttcagaaacagggaaccctgagatgctccctggctagacgctcttttgatggattcatgactgctgagctagcctttcaatgggccacaataactttacttccaggaaacagcatcaggtcaacaaattacttgtttgtggtctgtttgttttctcaggtctggattttctttgatcttgggtaagctcaaactaatttggaataaaatgaaaacagttctctgcttccccacctttaatcagtaatgcccctgactgttttaattagaagcaaaagaacagttctctgtcaactcaaggcaaaggacatgcagtcctgccgtggcagagggagttggatcccagggtggaaagcaaggcaatatgaaataatgtttggccctattttcttagggaaaaagaggaaggttttgcttctctctagtttaagttacagcacaccctttcctctttattttttgtaacttctcttctaccgtccagtaattcttccaaccctgcctctgttcccaattggtactgtaaggcactggcattttccacaggagaatcttgattataatccttcaatcaacttgctgagttaagcatatgctttcatcaaaaactatataaaacctgtgtggcaaagactgataccttttgttctttggttggaatcaaagtgtatacaactttaaaccatcttttatgaaaccagcacttttatttctccttatcatttctcttcagtaggactgctataaattagacatagcagctcttgtttttattaaacagcacattactgagacaatttattcaaaatgcaagatttcataagctggaccagtagcttcaaaagggtgaatacaggctttagaatttggtacccttacacaacacaaatctataatgttttcatgtaactatatagaagtgcgtttttgttaatatcatttcttcattttggttagtgtttcttcttcacttccttatgaattatgcataagtgagaaaacaagccttttttcatgtacaatgatcctattttcctgaacagaaccctggctgaacagtattaaaattcaggttccaaaatgagccagtggtagagaagaaatagagtggaaatttaacacatccatttattatacactttaaaatgcaacagggacagatgcctcatgatgtttctcctcagctgtgatcactttctctacaatgttgaactagtggctctcgctctagggactatctggacaattacctgcagcttggagtcattacggagatgatcgtcaaggaactggctcatgggttacactcactgctctgttcctaacttcctgtgtaaacaactctggagcttaaatttttcttatctatattataaaaatatgtaaataatttctaaaatttagaaaagttatataattttaattctaaatgtaactgacagatggtggaatttctcccttttttggcaacaatttatttaaagtttggaatagagattttggtcatctcaatcactgcatctctctatccctggtatcagcatgtttaagtcatccgaacactgtatacaccatgaaattctacaagatattatgtaaatgagccaaatttacaactttggatagagaaactgattttaaaaatatagttaataatccataaatgatgaagaggtatgttttctgctagcttatagttatggtggtggagtgaggggcagatgttcttctcctctttgtatttcctctggacagtaatgtacttattctctaatgcagcaccttttaataaatgtttagtttctaacctcttgtgattttgttagtctcagcattttcttatttttcagcagaactggctgtgaattagaatcttttctataaagttgctataaaattgccaccaacaaccaaaacacagccagctgacacactaccaaaagtggtgtgattattacaaagtgcccccacatatttttgtgtgaccctacatgaacaacaacaacaaaatttggaatgctctcctttcaattttaagcagaggaattagttcaactaagcaaatagtcaaggataataagattcctgagagagtagagaaaaacagggacaatcgtatttatcttttgtaaaatcaagtttataagaatatgtctcagggccacagttaataaaatatctatttgttttcttgagaaccacaacgaagatatttgtgtaaaaggtcatccatagatgccctacggagttaacagcacaattgaggtcttgctgcttctgttacaagagtgcttcaaacgtaccattcaactgatagaatctattggaccttgttagagtccctcaccccattcttgcaacagttcccagaaaagaagaggaatgtgcttttcagagacttatgtctctactggagcccccttgatggcagggtaaggtgggagagcatggaggaagcctctcaagaagtgagacacatgcactttctagattattgttattactattatttttgatggagtcttgctctgttgcccaggctggactgcagctggttgatctttcagctcactgcaacctccacctcttgggttcaagcgattctcctgcctcagcctcccgagtagctgggactacaggcatctgtcatcatgcccagctaatttttgtatttttttggagacaggttttcaccacgttggccaggctggtcttgaacttctgacctcaggtgatctgcccatctcagcctcccaaagtgctggggttataggcgtgagccaccacacccggccgacacatacaatttctagattgttatttatttatttgtttgtttgtttttgagacagagtctggctctgtcgcccaggctggagtgcagtggcgcaatcttggctcactgcaacctctgccgcctgggttcaagtaattctcccacctcagccactttctagatcttgtaggacaagaagttgccacatggtgagaaggaaaaaggacagattatgagcaggaactgagtaatttttacctatgaccctgggactcatttaacctctaatcaaacagagaaaactacagtaaccataattattcttaagacagattatgcatgaatatatcattgattttattgcctaattcagcagaggaattactaatagatattttgctagttctacaggaagatagtgtagaaacataagctaatcaatgcctcatttctgatatttcttacctagtatggtgattagcttcagtgtttttaaatcattctctaaaaagtacatccctgcctgattttctttccatgtgttctgttgattactgagaaagaaatgtcaaagtcttcaactgtaatagtggatctatgtgtttgttttatttatttatttttaaatattttatttccataggctttggggaacaggtggtattttggttacatgagtaagttctttcgtggtgatttgtgaggttttggtgcacccatcatccaagcagtatacactgaactcaatttgtagtcttctatccctcattcccctcacaccctttcccctagtccccaaagtccctcctatcattcttacgcctttgcaacctcacagcttagctcccacttatgagtgagaatatacgatgtttggtttttccatccctgagttacttctcttagaataataatctccagttccatccaacttgctgcaaatgccattcattcattccttatgactgagtttgttttaattttcctttcagtttatccagttttggctttattattttatttttgtttgtttttgttattgtagtaaaatacacttaatataaaatttatcattttaactattttaaatgtaacgttcaatagtattaaatacatccagtatgtcatgcatccatcaccaccataacactttttgtcttataaaatggaactccccattcctccctctctccagctcctggcaccaaccattctatttcgtatctctatgatttttgaccactctaattacctcatataagtagaatcacagggtatttgcctttttatgactggcttatttcacttagcataatgtccttaagcttcatccatgttgtagcatttatcataattttctttctttttaaggctaaataatattctatcatatatatatatacacacacacacacacacacacacacacacatatatatatatatatatacaccacactttgcttatccatttatctgttggtggaaacggcttgcttccacattttgctatcatgagtaatgctgaaataaatttggtaaatatctcttcaagaccctgattttagttattttggatatatactgagacacgtaaatgctgtattatatggtaactgtatttttaatttcttgagacaccaccatactttcttccagctgtacaatcttatactcctatcaatactacacaagggatctaatttctccacatgcttgctaacatttgttattttctgttttttgttttttaatagtagtcatcctaatgggtattgagtgctatgttcttgttttgatttgaagttatctgatgattaatgaacatggaatagaatagagagctcataagcaaatcctcacctgtatggccaaatgttttttgacaagggtgccatgattattaaatgagaaaagaacaatcttttcaataaatgatactgaaaactgtatatccacatgcaaaataaagattttggaactttacctaactccatatacaaaaattaaccccaaatgggttaaagacctaaatatgagacttaaaattataaaactcttagaagggaacacagggcaaaagtttcccaaggttagatttggcagtaacttctgggatataaccaaaggcataggcaacacaacaaaaaatacaaagaaaaattgggcatcatattttttttgtgtgtgtgtgacagagtcttgtcatccaggctagagtacagtggcaggatcttggctcactgcaacctccacctcccaggttcaagagattctcctccctcagcctcctgacctcctgagtagctgtgattacaggcacgcaccaccatgcctggctaatttttgtattttttagtaaagatagggtttcaccatgttgaccaggataagtcttgatctcttgacctcgtgatccgcctgcctcagcctcccaaagtgctgggattacaggtgtgatccactgctcctagtcttttttttttttttttttttttttttttgtgacagagtcttgccctgtcgctcaggctggagtgcagtggtgcaatgtcggctcactgcaacctccgcctcctggattccagtgattctcatccctcagcctcccaagtagctgggattacaggcatgtgacaccatgcccggctaattttcatatttttagtagagacaggggggtctcaccatgttaggcaggctggtctcgaactcctgatttcaagtaatccacctgcctcggcctcttgaagtgctgggattacaaacatgagccactgcacccagccaccataaaaaaattttttaaaattatttatcaaaatcacaaacaaaaggcaatccacaggagaaaatatttgcaaatgaaatatctgataagagattaataaccaaaatacacacagacctcctaaaactcagcaaaaacaaaaacaaacaagtctattttaaaatgggcaagagaataaatatacatttctccaaagaatatacaactggctttagtattggcttcaaaatagtattttgaagctctactattagatacatatacaattaggatttttatctcttcttggcaacttgaccctttgatttttatgtaatatctctcattgttccttttaaatttctctgctctgaaatatgctttgataatcatttagtcacttcagctttctcttcattagtgtttccatggtatccttttccctatccttttatttttaacttatttatatcattacataaagtaacactttatggaaaggatatatttgatttttttatttatttggtccattctgacaatgtctgtttttttttttttttttttttttttgagccagaatctcgctctgtcgcccaggctggagtgcagtggcgcgatctcggctcactgcaagatccacctcccgggttcacgccattctcctgcctctgcctccggagtagctgggaccacaggcgcccgccaccacacccgggtaattttttgtatttttagtagagacagggtttcactgtgttagccaggatggtctcgatctcctgacctcgtgatccgcctgcctctgcctcccaaagtgctgggattacaggcatgagccaccgcgccgggccgataatgtcagtattttacttggtttgtgtagccatttacatttaatgtcaatattggtatttcgaattatgcctaccactctatcatgtatgtttactttttcttccctttgctttatttttctgtttccccttccctgccttcttttgttatttgaacattttcagtttaaccaagtttgagttttgctgctgctacttcttttatttactgcaggctttgtattgttttacaggactgttgccttgtgctcaaaggggtggctgaagtgccagagatttttggttttctgttctttgtttttttgttttttttcttagtgtttgtgatgtaccttcaactttcataatctctgcaaactgcactacagcaggggtctcactccatactactgtcctcctcccatactggtagcctgctcttaccttttggattctgggctagcggtggtggctggcaaggattcactcttgtccacattcagcctcagcttagacagaccttgcgtgccaggcttcctggggaggagggaactttctcagcattcttactccttcacctcatgtcagccagctatgtccttgatctgtggttggttcttacaaggtattctctgatcctaccccatgatagcagacctcgaattggtaatagataatagattctgggcccaggatagtttttacaggaatttttcttctgctttttccacagtgaaaatgggtctttgccagtgtccttaaagtgtgggttgttgtccctcctccaagtgctgtaggtttttgattcataggagaaaagactctaaatataattgtaggaatttgtatctcccaggccccagtagctacagatcattttctacagtcttgcgtcagcaagaagagctctctttggtctgttctgttccagactatctcataaattactgcaggaggtacttttaaaagagcttgcaagagagtatctgggccctcaattatttcatccatacctgaaagctagctcacccttggcatttaataattttataaaatttcagctgatttttaaattttctttcatggaagctgttgagtagccccttatttccctaattctttgactcagataagactattcttctgttttatctcttattataggggtatgttcctctttggaatttaagtattttggttgcactgcaacctcaggtatctaatgtgctcaaaaaagttataattttatgggtttttttttttgcctttatctcattgttagaatgggaacaatgttctttccagctttctacatcttagccagaaacagaaatatcttccctttggtatggctccacctatttgatatcaagataatttaatagtatgtagccacagtgcactaggaaaattaattggcttttaccagctttctgctataatgccttaacttgaagaagttaaataattttggaaaagtcagatattgggaacaatcaaatttcgaatatacacatccaatataatcagataagtagaaaatagttaacatcagcaattaaataaagtcagaaaatagatccaagctctcatacatttgtctatcaagataaaagcttcaggggaatagacagcttttatcataataaaccataaaggtaaatccctcctccctcatacacattctttttttttttggtattgtgagattctattagaaacgtttttctgcctggcgctgtggctcacgcctgtaatcccagcactttgggaggccgaggcaggcagatcatgaagtcaggagatcgagaccatcctggctaacacggtgaaatcccgtctctactaaaaatacaaaaaaattagccaggcgtggtggcgggcgactgtagccccagctactccggaggctgagggaggagaatggcgtgaacccgggaggtggagtttgcagtgagccgagatcacgccagtgcaccccagcctgggcgacagagcgagactccgtctcaaaaaaaaaaaaaaagaaacgtttttcttcatgtaccattggatttcttcaagttttacagtactctctgaaattctaccatgagcttctgtgcggggatctttcccgcagaccctgacccaacgatagatgaataacatacgctgatacagatattctgcttgtcagtctagctaaggatctgcgccgctcacagacaccaaggaaggtgctgtgaagagttggcagccgcaaccttgactagctggcctggctggcatttattcagcacacattaaatgacaaaggctttgagtcaacacgcctgtgggtaattaacctggtcacacccactctggagagggccatcttgcctgccaatgatgaaaggttagtcttaggaccacatgagtaaacaagctatttagataaactattctacattcttttgtacccccaccctaagctctctggctcctgaaaacagactctggctgccttcagccaaactaccggaagttatgcaaaacttcccggctttccaagaaggtttgcttttttctattcctgtcatttcttctgccatcctgactgaacccctacacttctattacaactacttttaaggtaatatataacaatcaaactagaatccaaacaactataatcttaaactaatgtacaaagagaggggacatttacaatctttttcatggatagccaatcaataaatcatctgaactcatgtcaatggaggcttagttcaattttccacacctcatagatactcgaaacataatatcatcaagttgcaaatattcatatagagggttgtttatgctcactggactatgtttaggcaagaaaaaatgtcttgagaaattttataaaccatttaagcaatgtgtacaggaataaaatgacattatccactaatgtttagtttaacataaaattagattaactagaacatcctattcccaaagaaattcagtcagtaatggttttataataacaagaattagaaatatttatgaaaatttcttctgagaacgtcactgaattttcatctgtgtaacttaagttattcctccaagatccctatgaagtaggaaaatgttttatcatcaccatgtgacaaagtacatgagtagttaagtatcttaccacaggatattttggtagaaaacaacataattctatttgttcagacatttacatttgaattaatttacaaatgcatgtaataaaccagctaagtcatttttataactctgaaaatcccaagactacagtgcatttatactgctggagattagctaacagttaaagatcagaaacaatcaataaaagaatcattgtatagaaaatactattgtgtaactgtgcacacttatcagggattaactctttccttaatctttaataaacttcatcttagaaaatacctagcccgcatctttcttctttcaactgcatccttaactttattttcagatataagtgccttatgaacaaacacttgattgtccattaaaactgtcctgctcttttaaaatccagtttaaactcttttctgagtaccaaactgatatctttgcctgtttttattttgttttgtttttaaatggaacagaacacaatatcttttggacagctacaatgcttattcaaaagtagtgttgagatgagaagtaatcctttttaatgttttaccaaagaactgtattaatgttatgcagtgctaataactgctttaatcctttagatttcttttagccaaaaacagagtgatgagttcctctatacttagtctataactttgtttaatattctttcaataaacttttaagaaataatcttaattttgagagtgttggttgttttctaactgaaatacattgaataagttatgaacaaataccagccctttagctaaatagtagacatctttctggaaagtgacactgtttccttcctctaaagataaagcaaaataatgcatcgaatgttacaccaaataccttactaaagagttttacagagatatttcctgatgtcatagggagggcttcagcttttataataaagaagaatttggttaaaattctaagtttacttagtcaaatgtgtgacctggatccatgagtctctttccgcatctatagggtagggattataatgtatcattttaaaggtagttgtcaagaaccaatgttttaaatatttaaatagccctatagagaacgtggagcttcatgaaagagaaaatatttctttctttgttttctatgcctatagactactcagacattgagtttatgtatattttgtacttactattgaatcacacactggctcattgcgatatcattatatctgaaagaagagacactaggagataggggtagagagaaaaaaaggaattttttttttttggaagtggagtctcgctctgtcacccaggctggagtgcactggcacgatctcagctcactgcaagctccgcctcccaggttcacgccattctcctgcctcagcctcctgagtagctgggactacaggcgcctgccaccaggcctggctaattttttgtatttttagtagagacgggatttcaccatgttagccaggatggtcttgatctcctgacctcgtgatccacccgccttggcctcccaaagtgctgggattacaggcatgagccaccatgcccagccaaaaggaatttttaatgttcaataaaataaaaaaaataccctgtttccaagccctgttttctaatagatcacccctacacttttagaaatagatttctagcctcccaaccattgtaatagatgcagaagtttctataaaatatttagacaattattttaatctttgctgaaacatttctagtgataggtatagaacctccaatcttatttatagatttaaataatttagtcaatgtctaaatctctataattgcccagtttaagtcttatggaccttcataaacaaattctaattctcctttgttgtgagaatcttttaaggaccatgttcatgacctatagtgaatatgttgttcttctctgcccacattcccttcttgaactgtttttccttccttcactccttgcagccttggtgagactctcttggtggcctgtgattggagtgaccagaagttaacactctgtcccttgtatagtcatgattccaggggctggcacaagaacaaagcaaaataattcttggccttcatggctaaataagtaatgatctcccctttttgcttaagataatctgagtggtattcagttgcttcattagcaattaatgacttatgaatatattttgtctatatctatactttgtctcctgcagtacctcaggcttattagggtggggaaaaaactccgccctggtaaatttgtggtcagaatggttctctgttctttaaccctgttttctgttgtttaagatgtttatcaagacaatacgtgcacagctgaacatagacctttatcagtagttctgctttgtctttgtcctgttccctcagaagcatgtgatctttgttctgctttttgccctttgaagcatgtgatctttgtacctactccctgttttacaccccttccccttttgaaaccgtcaataagaaactttctggtttgagcctcaggtgagcatcatggtcctaccgatatgtgatgtcacccccagcagcccagctgtaaaatccctcttttgtactctttctctttatttctcagctggctgacacttatggaaaatagaaagaacctacattgaaatattggggttgggttcccctgatatgctagtaccatttattaaatagggagttcattccccattgctcatttttgtcaactttcttgaaaatcagatagatagttataggtgtatggcttatttctgggctctctagtctgttccattgatctgtgtgactgcttttgtatcatgaggtccatgttgtaccaacagtaccaagctgttttagtaactacagccctgtagtatagtttgaagtccgggaaaatgatgcctcctgctttgttgattttatttaggattgccttggatatttaagttcttttctggttccatacaaactttaaaatagtttttttctagttctgtaaaaaatctcattggtagttggatacgaatagtattgattttgtaaattgctttggacagtatgaccattttaaccatattaatttcttcctatccatgagcatgaaatgtttttccatttgtttgtttcatctctgattttttaagcaatgtctggtaattctcattgtactgatttttcaactccctggttagctgttcctaagaattttattatttttgtgagtattgtgaattgaattgtatttttgactttgctctcagcttggctgtttttggtgtataggaatgctagtaattttttttttttgagacaagatcttgctctgtttcccaggctggagtacagtggcaagatcatggctcactacagcctctgcctcccaagttcaagcaatccttccaccttggccaccccagtaggtggtaacacaggtgcatgccaccacacccacctaattttttattttttgtagagacaaggtatcaccatgtttttcagggtggtcttgggctcctgggctgaagcaatccacccacctcagcctcccaaagtgctgggattacaggcatcagacactacacctggctggaatgctagtgatttttgtacattgatgtatcctgaaactttgctgaagttgtttatcagctgagggagcttttgggctgtgactatggggttttctaggtatagaatcatatcttctgcaaatagggatagtttgacttcctttcttcctatttgggtgtcgtttatttctttctcttgcctgattacactggccaggacctccaatactttgttgaataggagtgatggagagggtatttttgtctcatgccagttttccagagaaatgtttcaagcttttgcccattcagtaagatgttggctatggatttgtcatagatggatcttactattttaaggtctgttccttcaatagctagtttattgagagtttttaacatgaatgaatgttgagttttatcagaagctttctctgcatctactgagataatcatgttgtttttgtattttagttctgtttatgtgatgaatcacatttatttttatttttatttatttatatgttttgagacagagtcttgctctgtcaccagtctggagtacagtggtgcaatctcagctcactgcaacctccacctcccaggttcaagcaattccaatgcctcagcctcccaagtagcttggacttcaggcacgcaccaacacgcctggctaattttttgtattttagtagagatggggtttcaccatgttggacaagatggtctctatctcctgaccttgtgatctgcccatctcagcctcccaaagtgttgggattacaggcgtgagccaccgcgctctgccaaatcacatttattaatttgcatatgttgaaccaactttgcatctcagggataaagctaacttgatcatgatggactaacttttgttgtgctgctggatgtgtttcactagtgtttttttgttgaagattttttcatcaatgtccatcaaagatattggcctgaagttttcttttactgctgtgtttctgtcagactttaatatcaggatgatgctggcctcaaagaataagttggggaggagtccttccttctcatttttttcaaatagtttcagtagaaatattaccagctcttctttgtacggctggtagaatttgtctatgaatctatctggtcctgggcttttatttggttggtaagctatttattactgattcagttttagagatcattgtaggtgtgttcaggaatttagtttctttctggttcagtcttgggagggtgtatgtgtcctttatcaggacttttcattaagacttcactcacatgcctggtctcttaatggggcagttgaaggctggcctctgatgaatgggcttctgtctctctaaatgtagtcttacagcctttccataaagtccccttagcagagaagtcagactaccctttgagtgcatagagactgcattgcagcttaggtcttctatatatcaaagcagaaactgcaaatcctctttgaaactagatctgaaactggcataacatcattttctctacattcaactgattaaaggcatcacaggtcagtctagttcaagaagaggaaatagttcaaatctcttactggaagattgtaaaggaatttacagatttttttttttttttgagacggagtctcactccatcatccaggctggagggcagtggtgcaatctcagctcattgcaagctccgcctcccgggttcatgccattctcctgcctcagcctcccaagtagctgggactacaggcgcctgccaccacgcctggccaattgtttgtatttttagtagagacagggtttcaccatgttagccaggatggtctcgatctcctgacctcatgatccacccgcctcggcctcccaaagtgctgggattacaggcgtgagccaccgcacccagccagaatttacagatatttttaagccacagaatgttcataacagtcttgttcataacaataacatgagaacaacttaaatgtccatctgtgaaaaaaatatcatagctcacaaaatgcaacactatataacagtgaaaattcacttgaaggcattatatgctgtcaaacagatgaatcctaggaacaattttgttgttgtatttaatgtaaaaagttttttccaataatacaatacattcttattaactatagtcaccatgttgtacaatagatctcttgaatgaattcctcatatgtaactgaaattttgtatcctttgactaatatcgccccaaccccttttccacaagcccctgatagccgtcattctagtctctacttttatgagttcaactttttaaaatttgacatgtaaataagactatgcagtatttgtctttctttctttggcttatttcacttagcctgatgtagtccaggttcatctatattgtttcaaatgaaagatttccctttcctttcatgggaaaatagtattcccttgtgtatatacaccacaatttctttatccattcatctgttgatggacacttacttagattggtttcttatcttggctgttgtgaataatgctgcaataaacaatgatgtgaagatatctttctgatacgttgatttcacttcctttagatatacacttagtaagtaaatagctgcaacatacagtaattctatttttaattttttgaggatcctctatattgtttttcatagtgggtgcactaatttacattcctaccaacaatgtgcaaagattaccttttctccacagccgcacctattgttatcattcatcttgataatagccattttagcaggtgcaatttctcatcaagaattgtttcctaatatctgagacttagaaatttgcatttatctgatgattagtgatgttgcacacttatttacatacctgttaaccatttgtatatctccttttgagtgatgtctgtccagatcttttacctatttatttatttattttgagatggaatttctcttgttacccaggctggagtgcaatagcgtgatttcggctcagtgcaacctcctccttccaggttcaagtgattctccttcctcaacctcccaagtagctgggattgtaggcatgtgccaccatgtccagctaattttgcatttttagtagagacggggtttcgtcatattgaccaggatggttttgaacccctgacctcaggtgatccacccacctcggcctcccaaaatgctgggattacaggggtgagccactgtgtgcggccttttacccatttttaattgtttgtttactattgagttgtttgagtcccttatgtattttggatagtggctccttatcagataggtggtttgcaaatattttctgccattccataggttttctcttcactctgccgattgtttctttggctgtgcaaaagctttctatttgatgtgatcctatttgtctatttttgctttcgttgcctaggaatgttataagtccttcaattaatcttcaagttttagactctttaaaaaaaaacattctttttgagccgttaagatatgctttgcagaagactggtaccagctgcttggaaatttcctcctatattccttcagtctttggtcatttctgctcagcttcatttatgttcatggtcttatcatccacctctagaatgtttttaaaatccttcatacattgatgatatttcttatttctcttctcatctgcattttatttcacagggctctgtgatgattgtgtgtgtatagctaattgtcctgtgcaataggttttatgtatgcattttctgaattacaaccatgagaatactggagccaagataatgggatccaaaattgagaaatctcaattcacattgttttggattccttaaaaggaaaggacttactaaatgttagtagtctgtacacaatatttatgcacgatttgctagttttgaattacagagaatggcagtcaaaaaagaggaacataatctgtttgctattttggtttcttcaaatatatgttaaaaattttaaatgaacattctaatgataaaatattttaattttagaagagtgttttcttgggacttttaggccctataatgtctcttggaattcaaaagcttttgcataacaatgttttgatgagtttaagtataaatgtaaataaaaaaataaggattaaattttctttgacacacgtgaaaagtttgagaaaaaacatgtttggcacatatggtctagagtcagcaaaacaggaactatcagcaacttatcccaaagtagttcacaaaacacaaaatccacaataaaaggttatccaattccccccacaaaaaagaggccaaacatgtgtattgttaaattaacagaggtagatccatatattttatttgtttccttgggaatatagaatgtcttaaaagttgaatctcaataaatcagttttatgcagtgttctgatatgttatattcattttgcttctaaaaccttctagaatcctgtataagactagttaaccaattgggaacaatgttagcaaatatttccacacacacacacacacacacacacacatgcacacacacacagagatgaccagaattttgcttaaacatctttctattgcagtcaaaactattccttcgtagagaaactaatgtgtatatttttaataacaggtttatattattgaaatgactgtcacacatgctgacccagatgctgtggggacaatagcagtcctacagttgtacagaaattagaaaggaatgaaatatttgatatcaaatatgaacttggttgtacttgttgttgcaatagatgaacttaatttgaagccaaaagtgtatttcaattcccttatttcctaacacaaagtaaaagaggcagatagatactgtcatataagaacaagattgaccaaaatggtcttaaccagaagggttatgatagtaaattaaattaaatgtaaacaaccaaatgaaactgaatgttctgccagaagcagcaaaaatatatctcagagtaataaaccataacatcttcaggaaagttcccagggcaatagttttaattctcccagcaggtactacctatattataataaagggttattttctagcatgaagtttataatttgtaactgctaatgaatcaggttatatttgccagtttcatccagtaagttgctgttgttgttgctgttgctgttcttgttattttatgaacatagcattggagagagaagttagaaaatgggtgcttatgactaaaacacattttaaggtcagttcacttcaagacagcaaaatggattcaagatcttctttaaaatgaagaattgttttagtctgctttgctgttgctatgacagaatacctgagactgaaaagaagagaaatttatttgagttctaaaaaaaaaaaaaaaatagtcgaagttccaggggctcatatctggtgagggccttcttgctgcatcatccaagaaggcagaagggaaagaaaggatataagagcgaaaatgcaaaagagggccaagcttgcttttataacaagcccactcttgcaatgattaacccattcctgtgagaccaacattaatccattgatgaggtctctgccctcatgacctaatcacttcttactagaccctactttccaataccgttgcattaggggttaagcttctaacacatgaattatgggagagacattcaaaccatagcaggagtctctttttctaattattgccgattttcaaaagtgagggctatctaccttctctacaaacaggaattatagactttagactgaacacggtgtcacaaaatgtgctgatcaaatgctgttcatattaaaatcacttgagagaaatgttaaatatacagattcctgagcatcagtccaggttcagccagatactgaatcagaatctgctgtgttggggctcaggaatcattaatttgtagagccacgtttggaagctactgccttcaaagacataggaaggagggacttatctcttactattcctcaggatcttttctgaatttgcagatatttggggtaggacaaacatcacatatcttcaacggagaattgtagtataaacatcaggaacaggtgcctgcccaagattgtcctctcctgcctaaatttacttgatgctacttataatccagatgcttatgcaaagatgcttgtgggtttaggaaccatttatagagaacaaagagaaagaactaatatatagagaatacattatgcatcagatacttattacttttatgtaccttatataagtaaaacctccatcacacatactacaatgcaccattagtattactcacattgtacaaatgaggatttcaacggagagaatgagacattcaaactaggccatgaggcatgcaaatggcacagctgggattcaaacttagctccaactcttccaaaaatagcaggagagacagaatctgtttgatttcttttacctttcaatatctacaatatgaatatactggtcaaatataatgaaacttcatttattagatacagttgggggagagacaggcagatcttttctaatacactgggaaatctgaaatatgtgttcaccggaataagagatctgcatgataccacagtctccatctgatgtagtttaattttaggaaatgtatgatcaatgtgtcaatgttctgattctctcttattatgaatttatcatagtattaatagttgaatcattaaaatcctaagccttgatttagcatcttgtatttattaatcgcttatagcttatttcaagaaagcaaagtgcttcatttattgaagaaaatctacaaaacagttattttttaaaattgaagattgcaaaattgttaaatatataatatagttgttgcctttatttgcttcttccataaatgtgatttttatgagatgtttcataaaaatattctggaatttgaagcaaagccctatatgtagttacaagcaagtggaaggcaagatgtttcaatagttttgtactcagccatttatgaccaactccaacggtcattgcaatcttggcatttcagagaaaaggaaaatgtttctgtccatactggccctttactttttctagtcatttattcaacaacattgaacaagttgttcaatgttgatgaacattgttaattaaacattgaacaagtagctattggcttacttggaaaaagcctggaggtcaactttacacactggacttctataaattctgtgaaaagaaaaatcagatctcatttattttaagctcaatttcatcaatcacagggtctggcatgaaactaaggcttttctaacactcggtaaataaatgagcaagtgtgctggtgggtccttctgtgaatggtattttttttctgttcattctatatattccactcttcacaattcccaaacaagagacgttacttcccccttttgaatgagtcaatgcaatgagatatcacttcataaaataaccttgaagacaaatttaaatgttctttcttttaaaatgtagatatcggccaggcacggtggctcacgcctgtaatcccagcactttgggaggctgaggtgggcggatcacgaggtcaggagatcgagaccatcctggctaacacgatgaaacctcgtctctactaaaaatacaaaaaattagccgggcatagtggcgggcgcctgtagtcccagctactcgggaggctgggtcaggagaattgcgtgaaccctggaggcggagcttgcagtgagccgagattgcgccactgcactccagcctgggcgacacagtgagactccatctcaaataaataaataaataaataaataaataaataaataaataaataaaaactaaaaaattaaaatgtagatatcacagggggaaaaagggcagtatgaaaagtcctaggcccttcggatgaaaatgaggataagataatatgaaatacctgaacaacttgctttttcaatggggacataatcacatcataagatgcagatgtgttttcagttgttgttttggtttttgacatgtgcaaagaacacacaggcaccaggtaaaataaccataactgctacttaatataaacaaatccattttctgtctcttcttcctttaattacattattatccattggtcaaagcaatatgaaccaattctagtagaaattacattgaaagctccaatgaaatgggattttcttgggagtcacccaataaatagattttctgagcagaggtttacacttatgtatggtactaataaagattatctgcaataagattggcaatgacaaattgcctactatagtaatagtttcattatatagaattattacttggaaaattaattttaattgaaaacaatttatctgagttgtagaagtaaaaagattctcccagcagaatttatacctgctgtgtctacttaacagtgattatttccctaactttctattgactcaaggctttctgtgctctatattttcctcatgcatataaaattatttccacagataggaacacagcatttctttgcatttaatcttctttcataaccaaattaccatatgaaacttctatatctgcatctcacttgggaaaaaactggtacttgcaagaaagtttattggcaataaaaagaatgtatttaaatttacacacacacacacacacacacacacgcaaaaattcagaataaagtcatctcctgatagcttctcctatttacaatatttgttcaaggaatgaaaactacatattccttattaaaaatatttttcctccattatgatttgaaattgtcaaataagaggagtggtcaaatcccaaatcaaaaattctttttgaactgcaccatttctccctgattaagtatttaatcctcacctaaaggtctctctgaagttgaggtcttgaaaaattccttcttggtgtatcttccaaatggaaatgcactggtaaagctttcatgcaaaaagaacacatttggaattacatatctgattcattgctacagtttacaactagagcctaggagtttccactgaaaactgagataatcactcatggtaatttaagaatcgtaacttttctggatgtttcctactaccatcatatttgtagaaaataggaaatacctgttttaagaagattccacagaaatgtgtttaatatatatcactatgcacaaatagatgcacaaatttatactgtcttttgtcattgatgtttttttttatttttagatggagcctggctctgtcacccaagctggagtgcagtggtgtaatctcagctcactgcaacctccacctcctgggttcaagcgattctcccgcctcagcctcctgagtagctgggattacaggggcccaccatcgcgcccggctaatttttgtagttttgtagagatggggtttcaccatgttggccaggctggttttgaactcctgatctcaggtgattttttttttttatatactttaagttctgggatacatgttcagaacgtgcaggtttgttacataggtatacatgtgccatggtagtttgctgcacccatcaccccatcatctaggttttaagccctgcatgtattaggtatttgtcctaatgctctcccttctcttgccccacaacacctgttaggcctcagtgtgtgatgttcccctccctgtgtccatgtgttctcattgttcacctcccacttatgagtgagaatgtgcggtgtttggttttctgttcttgtgttatttgctgagaatgatggtttccagcttcattcctgccctggcaaaggacatgaactcattcttttttatggctgcatagtattccatggtgtttttgtgccacatttctttatccagtctatcattgatgggcatttggtttggtttggctttgaaactgcaatccctcttcccaaaaatccccacttttcccactttctgaatgaagctcacacagcaggttggcatttaagacatgctactatctggaaaaaaaccctcaattttaccacatatctatagcctatagattaactggattattattattaatcaatttttaagcccacctcattgaatatatgagactctcaagattagaagataggatggcattctctaggaaaactgtcctctgtttcaaataacacaccaatttcaagatcttcctgattccatcagttacctcctttttccatcaactgtctgtgtgtttcttctttccttggattgaagatatttacatttctgattttcatcaatatgttataatcattttttttttccgagacagggtctaactctgttgcccaggctggagtgcagtggtaagatctcagctcactgctacctccacctcctgggttcaagcaattctcctagcctcagcctcccgagtagtgaggactatggagcatgccaccatttctggtctgatatatgtattttagtagagacacagagagatggggttttgccatttaggctaggctggtctcgaactcctgacctcaggtgatccgcctgcctcagcctcccaaagtgctgggattacaggtgtgagccaccaaggctgccctcttataatcattttgatatgcatatttccttcaaaatttatgttaatggaactgaattgcttgtaaatcatgaatgaatggcttgtaaaatcatcccacagtgaaatattcattggaattttttttctgtactgactcacatctgggtaagagaagtagaaacagtcaattacatggatattttatatgcatattatcaaataaaattatatttaaaaaaatagcatatttgatatcacatatacatatattaagccaggataactttaagaaacctttatttcagtttctttagataccaattatcgttactctttatctcatttatctgaagaaaatgcacatgaggcagaggaatctctcctccctattacaggggaagcaagcaagaaacacattttgttcttgtgaaagacttaatgggagaaaaaaacagaggatggaaagccctaatctgacctgcaaacaaaaaagtcctttgaaaataatgaagtaagccctgttacaggggaagcaagcaagaaacacattttgttcttgtgaaagacttaatgggaggaaaaaacagaggatagaaagccctaatctgacctgcaaacaaaaaagtcctttgaaaataatgaagtaagtaatttcctcccctctattggcaatgccatctcaatctctaagaatttcctattcactccttgacctttccaaagaggtcatcaccaaaggaaatgtcttacttcaagagtaacaacagactttaaagatcttaaacaatttcagagtatagaccttgttagatcctgttctcttgaaggggaagagtaagcaagggttttttgccaaagaaataacttttcaatgaatttcaaagcacttgtgtgtgttctgaaagtatagagctggactctatataaattctaacatgtcaatatattttacattgcctgtatcttgaaataatactttagctactgaggattgtcatttattgataaggctatatctgatttaggaatttagactattaaaaaaatagaagaaatgttgagctgaaaaaactataaacttttctcaaataaaatatgtccatttgattgactacctggtttcactttattcaaaagacaattattttctataaatctatatatgtttgtaatttatatgaaagctttagaaaataatttatactgattatatataagtagctacagtgttaaaatttctattatattattttactttttaaaataatttgtatctgatttatggtgtccaagacttaagatgagaatttagtgaattatatttatgtcatacagaaaagcaaaaaagataaatatataaataaatgataagatataagatattctagtcatggctgggcatggtggctcatgcctataataccagcacttcgggaggccaaggcggttggatcacctgaggtcgggagttcgagaccagcctgaccaacatggtgaaactccgtctctactaaaaatacaaaaattagccaggcagggtggtagagcctgtaatcccagctactcaggaggctgagacaggagaatcgcttgaacccaggaggtggaggttgcagtgagctgagatcatgccaatgcaccccagcctggacgacaagggcaaaactccatttcaaaaaaaaaaaaaaagatattccagtcatgaaaaataacagttatgaaagtttaaattaagaaactgaggaaatgataattttttaaattgtatcagctttctttgtgctgatattaaatcagaactgttctaaacatgattcttatgtaattggttactattttaaaatgacagatattgaatgtgttaataaacctttctgaagccatcttagttaatggccattcagaagtagaatctgaacacaagatttgagagcaagtgatgcaataaagaagttctgccaaaagaaaccactcagaaagtgtaggaaacacaactggaaaaaacaagtcaagcaaggctatgatttcaggtgaggcaccagcctcagtctgactggatggggagctctggagggtaaattgcactttatagttggtcctatggggaatcaggtgtgctgagctgttgtattccactaaccattcattagctatgggccataagctgtccacagacaactcagctctaaaaagataatctgtcctctaaactttccatgctagtctttagcagcaaagcacagagagcctaaggagtggtcacacagttcctacggggaatccacggtttttacatgaggcactaacactgtctactgtaggaagcatgttgaattttaattagcaattctaagaattgctcataatattgttgcagatattgccagccacctaccccagaaccattcaccactgctacaaccaccattactgacaccaccacctgtagctctcttaccctttgctgatttagcctgatattattaaagcatttacctttacactatgcacttttaactattagaatgattggttttagccagccatataaatggcattttccttcacagtggttagtttagaagttagcaagaaacttaatcttcttgatttttcaaggaaaatgtatccatattttccaccctaataaaaaaaaactgcacagaagaaaatattcttcatgacaacatcactatgcctgcatgcattgacagaaattactaaggtcatgttgccatcataagtggcaacaaaatagacagtctatagatagcaaagtaaatcatggaaagccacaaaggtttgggtgagacttctgggccactgtaacctccacagagctggatttttattaagcaaataaaaaaactaaatagttgtcagttgggtcttctgtgttagaaaatgcatttttattaatataataatagctctcaagctattggcctttataaagagcttacaatgtgccagctatatttataagtactttacatatatcaattcattctggtgaaagagaacacatcccacagctactaataaatatcataattgtcacatataatcaagttatttggctcgtattgaagacgttaaaattatgttgtgttgctcactgaagttactatacattatcactactacttccagcaaaaactatagggaggaaacagcagattatgtttaagtaatgtaaatagccatcttagtaaaatacttacataatatgtgtttttgattttcttaataatagtcttgtgcagaaaaacattttataatttataagaatactaaattaactattgaaaacatttgtatgtctttttttatctcctatatttttccaggcaatattagcagaatactacccacaaagttttctaagccatatcaaacatatcaatatgtttgtgaaatcaaagcacaaaaattcaaatttctgatatttaatatataaagtgtatctatacaatttataatttgataaattttacatgcttattctttctctgaatgtattacataattacatgagataaattaactcatatgctataatacttcatttaaggatagtgtcctcttcaaaattgatttggggatacttacagcttgatttagctcaactgaataaatgaaaatcttagcagtttcattgttgctacatccaatgagaaaaactatccagtatggtacctttgcctgctattattcttctctatttatctttattagtattctagagttattaagaatagattataattgaaatacgagaagtcctgggaaaacttcatgggcagccacctaaccactttttttatattctaccggaactggctttaaggaagaacaatcaaagtacatactttaattacaagcagaagaacagagtaactttaggatattcaatttttttaaattctagtctttatgtgaccctgcaaatttgaattcaggctgggtgtggtggctcacgcctgtaatcccagcactttaggaagcccaggtgggtggatcccctgaggtcaggaattcaagaccaacctggtcaacatggcgaaaccctgtctctattaaaaatgcaaaaattagctgggcacagtggcacgtgcctgtaatcccagctacttgggaggctgaggcaggaggatcacttgaacatgggaggcagagattgcagtgagctcagatcatgccactgcactccagcctgggaaacagagcaagactccatctcaaaaaaaaaaagtaagataaaataaataaataaataaagtaaattcatctttctgagagttaaagctaatgtctataaatttttattgataattaataatatttatctgtgacttcataaagagttaaaggatgaatataaaagaatatgattgccttagtgtgtgaatctcatgtggtaagcacacttgacaaatgttagatcctctcagttatttttttctttgtgactcagagcccacagtaggtggaaataccaataccaaattaccctatggagactaaaaacaggactaaaggagttaaagacatgaacttcagtatcttgagggagctaagattttaatttatgctgagatgtaaaaaactgacctgatgtattttattccacaagggtatttgaattttaaaagataaacgtttaaataaatgttattatatatgtttatccaaaatattcaaggacagagtagaactttcatagaggagaaattttcccaaggtggtgaagggcagtgtgccatgcaaagggctgcaggttcagtagcatagaagggctaaacagtggtgagagtgttgaacattctcgtgtagctgacacataaattgtaaatgggatgtgagacaataaaagcaaagggtaggctttgaaagtgagggccaaacttcaaaaatcttgtatgaaataagataataattaataataatggttgacatacagatttcaaatggcactccaaggcactatgtcttggagtatcaaatttagtttaagactgagagtaggattatacgagtaggagatgcatcatattcacatgaaaataaagagatacattgaggaatagaatgagaaattaacttgaatagtatgaaacttcagagagtggtaagtaccacagttatagaaggtaatcatcacccttactgataaatgaaaaaactaaatttcgatggtcaagataattttcccaggattatgtaacagacaagtcagagaatgggaaatttacctatctaagctttgttttttccaaaacgctgcactgaatgttaagaaaataaatttttagacaaaagtagcaagtcatttgagcatttaaaatagctaaaagctacaatcacacagacacacatacacacacacacacatccaacaacaaggaaggtagaggtattttggcatttgaaattattctagtaagaaatgataaaggtctgaaatagtgtagatttccctttactgtcagaggctaaattgatcttggaaacattactttctttgataataaagtattgtcattattaagtgtttataaggtatatgtgaataaatcacatagttacttttaaaggtaactcatgctggtgaaaagatatggagaggcaaaaaagccaatgttttaaagttttaacatatttttaagtgtatgaagcaaccaatttattttgatataatcattggtgaaagtaatgccatcaagcattcgcggaggcttttaattagaatcatgtgctatgtaaagctgttggacagagtttaaaggttcagaatgttggaggatataaaaaaaatggcaaatgccccgttgcttttgtaagggattttaaattaaagcagcaaaccttttaaagcatcacacagtgggaagaatgaaaatgaaagctaattaaccggaattatttttcagttgtacaattttgcaataatcttccatggagttcatgaccagaggatgactagaccttgagaagtatttgaagaaggggtcaatgtgggagccaaggcaaccatctgaaacagctggcctgcctgggcatgtctgagccagatgtccacttctggtccagggttagaattatgtatcaaatcaggtactgggaacaatttatctatgttaaaaagatgtgtgtgtgtgaatggatgtgtgtgtgtgaatggatgttccgctgtaagaacagaaaatagtatcttaattgtaatagaagatactttgacagcatgtttcaaaagccttaaaattcatatcattttacgcattatttcaattcttactaatttatattaaagatatcattagagtgaatatgagtatttattaccatactgtttattgacattttatttataataataaaacattccaataattttaattgttagtagtaagggaatggtgaaactcatggaatattcatgaaataaaatgtgtgcagccatgaaaagtcatgcaatagaagaatatttaatgacacaggtgtagagtaaaaccaaaaattattataaataatcacatctatgaattgttagtttaaaagtatatttaaggaatttatatccaaattatatatgtatttataaaaagacaagtaagaaatacacaaaatattttagattatattatccaaatggagttacatgtactttttttgtttacattatgctattagaaatttactcatttttataaaataaaattgttttttattttactaaaaatactgttctgagatatcaacagttggggaaaatgtgttagcaatgaactcaaagaaaagtagtataagcataagaaatatatttttacttcagcctaaaactaagcccttaacattccttaattgtggaatgtcaaccatctcactacatttccttaggctgcaaaatatgtaagtatacctctcttttcctattgtgcttttatgaaaatattctctttggtattcttttatgacatatcaattttaaaaaataaagttgtgtttacaccaacacattttcatacattggcacatggtatttataactctaaagccaaagtgggcacagactaggacctgctgaagtgggcacagactaggacctgctgaagcagggaatctgagtctcacagggcggcttcaccctctatgaccatctaagaatcttttggaatgatccccatcagcaatgtataattctacacattttaccatgcccactctaacaccagaaattatctttaataatatttttaatgcataaaaatacttattaaaataattttgaagaataaaaatatattttatataataaatattctataatagaaagatacaccctgcaattgtgttgtggaagaaaaatacaatagggaaagaaacctgaaatggtggcaattttgtttttaagagtgaatgagtatatatgtgaaggaaaaaagaagtgagagagagagacagagagagagagagagagagagcatgcacaggtaggaagaggaagagaaggaacacagaagaaagaattagatctcccttttgtcggttgataatttaattaactacctttcttaggaatatattatacattcagttgaataaatagaatgacagacactgaaaaatattcagtgtaacataatgtccaatatagtctaattccagttttctagctgatagtcctgggagtcctagagagagaagactgagggaaagagaaacccctccttgtgactggtttccagtggcttatgagtgaaggtattaaagccaaatagggtctttctgtgttttccgtgttccacctcttttcaagcatttgtgtgagaaccagggacaccttaagggagaagggaatagtgacattgcccttctgctttttcctctgaaatttctgattgtagtaaatggcttcattcaaagttaaccttgcattaaatatattttaaaatatatcaacttggtaatgcaaatatatatgaaaagaaaacagttcactcatgtagtttatggcatagtgatgctaaaatgagttaatatttattttatgaaagaataattgtacatatagaatttattattaattgatactaaacatttactgattagtaattcggatggttttgatttaatgaagtgtttcatacatgtgtatacgtgtgtgtgtgtctgtgtatatacatatacacacatataatttatagttatgtacacacctgtaccaatacctatgaaggatacttatatcatgactttgcacataaaataataatcaagctgctatttcaatttaaatatacaagataaacatttcattgaatgttacaaaattagccaggcgtggtggcgcatgcctgtaatcccagctcctcgggaggctgaggcagcagaatcgcttgaacccgggaggtggaagttgtgatgagccgagatcgccacattgcgctccagcctgggcaacaagagcgaaactccgcctacaataataattaattaattaattaatgattcctatacttctttttttttttttcactcttactgcccaggctggagtgtaatggcgtgacctcagctcacggcaacctctacctcacgggttcaagtgattctcctgcatcagtctcccgagtagctgggattacaggcatgcgccaccacgcccggctaattttgtagttttagtagagacggggtttctccatgttggtcaggctggtctcgaactcctgacctcaggtgatccacctgccttggtctcccaaaatgctgggattacaggcataagccatggcgcccggcctactcatacgtctatatttgttgcagaaaatgataaagtgttcaataaaataattctatgcagtagaataaattttttgtggaagtgaaatagaactatatgctcaaagaaaaaaaagaacagtcaaagatttccagatgctacgaatgaacatgttcatgaatatttctatatggatgatggcagggatcaaattgccaatatattttcaatttcatcaaatatgttgttaaaattgatagattttatttcaaaatatttctgtttataatgtaccaaagattatacaccatttacaactattacaatgaaaacattttaaatgtcaacctaaaacatttacaagtgagttcctagtttttgaaaattatataaaaggcaattaaaaaaagaaaaaaaacactgtcttggaacacacatacccctgtaaccatccacctagaatttggtgagtccgatgggaaaggctttccagtattcatatttgtggacccatgttttagctgagtggtaggaatacagttatttcatttctgagtgttgaataaatatagtgtcatatttgagtgaagattataggacttagaagatctagatatcataacatccaaaacaagctataggcagggttttcacttctataattcttggtcttcattcataaaaatcgagaccacattaatgcttacttcagaggagctgaatgtcagcagaggctaaaaaatgtagagtttactggatcatattaagaattacaagttttatttgaaataatatttccatctaaattatctttctaaacatctaaagaatgggtcaagcataaagactagtctatctagttgaagtacggagaaggaattgtagagagtagaggttagtgaggtggctaattaataggttgtcatgtcagtagaagtgagaggataagtctagcttgcactaggatgctgacatcagagaaggagagaaatagactcaagaggaattggcagataagtgtctcagaatatattgatgaatgcaaatgaggacaatttatggacagccagaattctggtctgaacagctggataggtggtggtgccacataacaggagggatcattgagggatacaggagaatcaggtttaagggtgaagatcatgattacaatattggttaggttgagttgaaccagtcttcgggacatggaagtgaatgtgtgaaggcaattggatgtatcaagttggagatcaggcaggatgttctgatgctatagatgctgatgagaaagtcactgttagtagaatgctctcctgctttctactaacaaagataagaactgaagtcatttgcatggagtcggtggagggagagaacttcaggtgtagactctgaggatcattaagttgaaaatacttattgtgtagtgtggatgaacacattatctagagtaacagtgtgctgagagtaattgcaaatcctcaacctcaatccagaggttgaatgaacctgaaaatagtttgttggaggctggcctccattaccagggaacatagagagctcacattaattagtgtgcatttttgaaattctaatagtcttttttttgttgagctgttaaaacaaatcaaagcaaaacaaaaaacctcattattcactgaaagttgctaatagaagatatgggcttatatctgaataatcgtcatatggatttatacctgaattgcacctttcctaaaaaatataatgacctttgtgtttgtgtgtgaaagtaatgtataaattcctggagttaaaagaaactaacaaaaaagaagtaattcaatctgggaaatcaaaagctgatgtatatgtgtgtggataagtgtggagtgacaggagttagaagtaggggaggcatatccgcatctgtggaaagggacttccagtcatatcaattgaaggaaagtttggaggaaagctttggagctctattcctgtcttttgatattaacttaagaggattattgcccttccattcattacggaaatcctaagcaagaggccaggttgctcaatgatactgagtaaaactaggacagcatagtaacattaatgtattaatgtagtaaggagctgataccaaccacaccagaataataagttttccttctgtgagttttcctttccatcccattatcctttcaatctcaaagataatggagtggaaggggggaagctaagaagatattctcctctctcagtctggtcccagggaggaaaaacttttgatatttgtatgtatggggtcttctctgatacagtatatagaaaagagcaagaaaagctgaggtaggtataaagattaaatgaacagcattgcagttgccacagtaatgtcagccactcccataaggaattctagagccctttagagatatcactaattgaggccagggagccaggcctttgaatgctgcaatgaccaattattgtacaccaatcactggacacagagaaagagatgggatagttcccttaggttgagatcaatttctgacaagggatgcaggcaacactgccagtagataagaaaataagggcccccatcctgaaggatgacataaacagcacctcattataaccaatacattttctttcaggttactcttttctttcaaagaaatgtaaggtgagtattgtccactctacccaaaagaatctacacattcaatgcaatccctgtcaaaatacaaatgacattcctcaaagaaatatttttaaaaatcgtaaaatctgtgtggaactacaaaagggcccaagtagtcaaagaaagaaattttgagcaaaacagacaaagaaacaaacaaaaagctgcagacatcatgccacctgatttcaaaatatactgcaaagttatagtaaccaaaataaaatggcattggtataaaaatcagacacatagatcaatggaacagaagagataatccagaaataaatccacggatttagagacaattgatttttgagaaagacatcaagaacatacattgaggaaaagacagtatcttcaataaatggtgctgggatatttggatatcaatattcagaacagctaaatgaggccctttaaacaaaatttaacttaaaattattaaagacttaaatgtaagatgcaaaactataaaagtaatagaaaacaagttagggaaaattcatcaggacattgctctaggaaaagatttcattgatgagacctcaaatgcacaggcaacaaaagttaaaacagacaaacaagaatatatcaaactaaaactccctgcataaataacaaaggaaacaacagcgtgaggaaactatctgtagattaggagaaaatatttgcaaactatgcatctgacaagggactaatacccagaatatatgaggaactcaaacaactccataacaacaacaacaaaaaacaatccattaaaacacaggcatttctgagtagacatttctcaaaagaaagacatacaaatgatcaacaagtatataaaaaatccatcacaaatcatcagggaaatgcagattaaagccacaatgagataatatctcaccccagttagaatggctactatcaaaaagaccccccaaaaaatttgtgcagagaaaagggaattcttatatactgttaatgggatataaattcatacagccataatggaaaatagtagagttttctcaaaacactatgtataaattttccatattatccagcaatcttactattgaatatttatccaaagaaaagaaaatcagcttatcaaagatatatctgaactcccatgtttattgaagtgctattcacaatgaccaagatacagaatcaacctaaatgtctatcaacagatgaatgaataaagaaaatgtggtatatatatatacacaatggaatactattcagccataaaaagaatgaaatactttcatttgtggcaacagggataagcctaaaggacattatgttgagtaaagtaactcaggcacagaaagatttatactgaatgttctcactcatatgtaagaactgaaagaagttgaacacatagaagtggagagaattgtggttattagaggcttggaagtatgggtgggtagggagaagttggctaagtcatacaaaattacagctagatatgaggaataagttctagtgctctatagcactgtagggagaatatagttaaaagtagtttattatatatttttaaaagctagaagagagaatttcgaatgttccccaaactgttatgagtatgctaattatctttatttatcttgattaccttaattggatcattacacattgtacccgtgtattgaaatatcactagatgccagaaatattatttaggttggtgcaaaagtaattgtggttttgggctgtgaattttaaatcattataactaggctcaaacacatctttattaatcaaaataggagtcattataatcaacacatttttgccaacaaaaaattagtttgcttattcctgtagcataaaaatatgtgcttcggaattcgacaaactcttggaaagcattttctgcatcctgctggttgtgggagaattttccctgcaaaaagttgtcgacatgcttgaagaagtggtagttggttggagggaggtaaggtgaatatggcagaaaaggcaaagctttgtagcccaattcgttcaacttttgaagcattggttgtgcaacatgtggtcaggcattgttgtggagaagaaccaggccctttatgttgaccagtgccgactgcaggctttgcagtttttggtgtatctcactgatttgctgtgcatacttctcaggtataatggtttcaccaggattcagacagttgtggtaaattagaccagcagcagaccaccaaaaagtgaacatgaccttttttttggtgcaaatttggccatgggaagggctttggaacttctcagtccaaccactgagctggtcatcaccggttgtcatataaaatccacttttcattggacatcacaatctgatcgagaaatggtttattattgttgtgtagaataagagaagatgacactacaaaaagtcaaatttttggattttcactcagctcatgaggcacccacttatcaagcttttttgcctttcctatttgcttcaaatactgaaccaccatagaatggttgacattgagttccttgacaacttctcatgtagttgtaaaaggatcagcttcaatgattgctctgaattggtcattgtcaatttccaatggccagccactgtgatcctcatcaaggctcttgtctcctttgcaaaatgtcttgaaccaccactgcactgtatgttcgttagcagtttctgggccaaatgcattgttgagtttgcaagttgtctctgctgctttatgacccactttgaactcgaataagaaaactactggaatttgctttttgtctaacatcatttccacagtctaaaataaatatcaaacaaacagcaagtaataagtcattagcaagaaaacatgaagcaaaaaatgcccattaaaacactatataacataagcacattaatttaagaatgtattccaatatcaaatggcaaattccaacagtgaaaaagccgcaattacgtttgcaccaacataataaaattattacatgtcaactaaaaataagtgaaaaaatatgaatagaattaacaagagttatcctttgcagaaaccaattctattctatgaactgtcaaatatgatcaacatatccttcacatctacgttcaaatcaaaggtagagaacagttcattgatgtgttatgataagaataagacttataggtggatttgcaaactttggggagtcattcatgatgagtgtaaacaaaatttattatctttgatgagcattcaaaccaagatacacacaattcataaaacatgactagcttttaaaattcccttattggctgcaatggttgtttcttttaaatacacaaaaggggcctggtgagatctgaaacacctgggtgacagtggcatcaatcaaatgtctctttcatccatttctttaccctgatgtaagaaatctagacgcttgcaaaacgttccctttaacaagatgaaccacatttgtctgtaactacagtaatagtttattcagaaattcatgcccctaacatctgtggggctcgggacaggaaatcaaatgtaagtctgcataccatatgtctaaatacttaaaagttaataaatcaacctaaaaacccattaaatatattctattcttctacattgaccaatatagctttataatgatcatgtgcagatatgtgtaaagctaccattttcaatctaagaacatctgcaaaatatcaaataccactgaattttattattgttgttcatgtcaagcatcttggagaaggccatgttgtctggattcagcaagttgttttctgattaaaaggcaaatgtgcttttgccatttacaaagaattgtattacagcctatggaaatacatattgttttaacatttacccaaactgtgactttcaagttttggaaattactaggaaatgcaccagctaaaagtcaaagggattattgttagttttatctccactatttttacttcagtatcaatgatgaagtcattgcaaaagcaagaaaaggataatgtcaaccagggcaaacacaaaatgagcaggtatataatatgttaaaaccctccatggtttactttgtttcaatacctgtaataaaaatgtttgatttttcctagaagagtctctatccagtttaaaactaatttctgtgtacctgtttttgagttttattatcaccatcaaataagcagtttaaaataataagcccagatcttatttattaaaatttatgggccatttttcaccaggaaaagggaagaatcttctgaacagccttgtatacatcagacaaaatatgcataatgagggcagtaggtacatttaaaattatagggtgacacactgacttcctttaaaagtaaacgaagagggaggaaaatatgagtttttaaatattaaattccatcaaaattcctgatatctgattaagtacgctccacttttcttacaggcagataccaatacaatagctttcaagtaatgtttaaaatgctttttttctctttggacaatcacattgtacctacctctcctaaagaatttcccactttaagacccagtattccaacacaaagggtacacagatgtaaggccatgtagagaaaagttaaaaataaaaactacagaatctggtacagctggggataattagtgaaaaacaagtttttgccagaaataaaaggaagttgggtagacaaatttttctttagccaggttttggaagattcatggaaagagaacatatttacaaccccaccccttctcttctattccatagaatctagcaaaataaacctccatcatataacacttctttttaataaaacttggttgattctaataacatttgaaaaatcaatcaattttgaggttctctatatctttttaaaccaatcctgaagcttgaacatgctgtttgaagactagagcaatcccttccaaatgtccatatcattttattttctgtacttgaatgctagtgtctgatagtgcaagattactattttacaaatactacttcacgtattttccttcagaagcaaatcttcttctgggttatgaatttaatgacatgatgttgttttcataaaaccaaattttctatcaagatttcattcaatttaatacacagtaatcagcatctgctctgtcagatagttatgtggggatacacgtctttccacataagactcagtttctaccctcaagtcccttgcagtctagctaagtaagaagacacaggctgtgtttccccttgatgattaaaatgttccatgggctgggaattctgtgccctagatgttgtcagcacttgatttctatcattcaacaagattcattcaactttttttaaattggtgaactgaaaatacttccaattgtatatttcctttctgttctcattgcaaaagtattcaatcaatgaggaaattaatcataatgaggaaactgattgaatataatggcatagctataaatttatataaaaatatattttttaatatttaggtgcttcaaatgaagttacacccagtcgttctatgaatgagagaaaactggatttgttcctgtgatgccaatttagacttagattggcttaaatttactttttatttaatccatgtgctactccttaaattatcaacatatagcaactcaaaaggataagtttgcattaatttatgatgccttggtaaagagtttggtctttgcttttctttcaagctggagccatcgcatgaatatttacactttaaaattcacaaaaggacattctcacaggttcgctggagtttaatgagtagttaatatatctgcaccaaagtgacaggtaaggaagtgtaagttttatgtaatgtttccattttggattttgctttctttcttgacatccttcccttccattatactgttacctctcttacttctaaatatttccttttatttcttcctgcaactttttaatgttgacattaagcctaggcctgatgtgtgttctttgcttaatctttaagaatcaggtgaagaataaacaaggatttataaaatgttgaattagtgaactgatttgatatgacttcaaggcagttaaactttctatctactgaagtaatttaacaaaggagctgaaacaattctctaaatctgtacctaccatattgcagaatatttgcaacaagtattttaatatccaacataatttttataattttctaaagaccttttgtatagaacactcttgataataggtttaataaagttgccttacagaaaaaaaacattattatttttactccagcagtgataatggaaacagactccattacattttactttcttgaaaatgttaaaaaaagaaacactgcatatcattaatattccctaaataagatatttgaatctaattacaagggtcttcaaaaatcatataacaattagtttagaacaattgattttctcttcaacgagcatcttgaaagcattttctttgtgtgaagaaacttagaagtttcaaaaccaacatggtaaaatctaaatacgcttttatttctgtaaattaaaattatgatttaagaatatttattccttgacatgcctctattgtattctgtaatcaaaactctagaacaaaaataaagtgtctctcattctagtttccaaacagaataacaattgacacttaacatttattttatttaaagtcctgttgtagaacattccactatggaacactgcttatgattgggaaaattctttcttctttaatgcaggaagtgttcaaccctgacacatgcatggcaaagacatccaggttgcacaattgtctaaactccccgccaattacttggaccaggactcccaaaaactttacgtgcttttggcttctgctatgctctttaaaacaacatagtcctaacaaactgcattccactgctaaagaacaaccctgactccagataatcagtcactgaggtccttgccttataaccaccatttgttcaaaacagagaccctgtgtccttttagctcctctttttgtcagaggcacattccagataaacaccactcttgcccttcctctcatgggtctttaacttttctgcatgtttctctctctgcctaggatggctatttctaccaatcacgttaaagtgactaacagaatatttaaatttcttcaacataaatgatagtttatggatagcaactattaatgggggttttttttttggtttgtttctgggtttttgttgttgtttttaattaattaattttattttatcttatttctttttagcagcaccatctcacttgccacacaagctggagagcagtggcatgatcatagattactgcaatctagacctcctggcctcaagctattcctccacttcagcctcccaaagtgctaggattacaggcatgagccaccacacctggccaaatatttagctttttaaaagaaaggagttggtcattatttgtaaagaaatctgcccattcccttagtaaaatcagccaggtcagttaccggttcagggattaaaataaataatttgtagttgtgttataatagacactattttccagggtcggcaatggtaaacaatgccctttaaggggaaatgattagaaatagaaacttcgagcaccctgccatagtgaaatgtggccctctatggtaaattaaagatggccacaaatattttcctatgttatattgagaggtgaagtccatttcccctctccttgaatttgtgctggccttaatgatttgtccaatagaaggcacgagggataacattcttagacttctcaggctagctcagaagaagtctcatagcttccactagatttattagaatgttggttctcagatcattgagatgccatgtaagaagttagactatcctaagaaactacaggaagaccctgagatgacctgaagcaagagagagacatagccatccaacaagcctcagctgtttcaggccctaaagatttgagtcatcctagctgaggttccaaatgttgggatcaggtacgtgttatctttactgagctctgcccacattgtagattcataagcaaaataaatgattgttgttattttaatccattaaggttttatttcttaggggagaagtgttactcagcaatggctaactggaacattttccattattattgattatatgagtttgaaattatgaaaattgttggagagtttccttatcaaatctttcctatgtagtaatatagttggagccatcacaaagccgaattttgaagtgggtaaaacttgtcttttatgccttctattttaaatctctctctctctctttctctctgtatgtatgtatatatatacatacatatatgtacattctccacttatggcatttcctaccaactgagcagtttaacagagacccaaagctccccatggactgcttctcactgctttttccaaataaaccctattagaaagtataattttaaatgtatctaatttcatccatttttagttgtgactggtcattcctacttggttatttatttcttcttcttccttctgcaaatatcattacttcttccttctgcaaatatcattacttcttccttctgcaaatatcattttctgttctcactatctctacatcagttctgaaacagataattactagatcacatctgtttatcctaaattcacccaggccattctctacattgcatccaggagtcttccctgaaatataactattaacactgatctgctttgtaaccctccccttcacacatcatgtataacacatacacacacgcgtgcacacacacacacacacttctttagaaaagagactaaattctttaaaatattttacatagtccttaaaatttgttttcgattttcgcttcactcttattactctctcaccattaccctaaactcaattggagttctaattccaagaaacattcatagctccttgatgtgtgcactctcatttccaagtctctgaaaatgtttctttcacgagtttctctgctctatggaactcactgaatctctctgccttttcttgtacccttcaaccttccaggtttcccactgtccctcagtcaaaacaactattgtgataaagacttcctggactcatctctcttaatattatataatctttctatttaatcccatagaagtgatagatatctctacaatatccctaatattattatttggttttcagtatatcataaatatctaagtgccagtagagtgacttattcacaatcctttgtaatcctagtgacctggatagaagaggaaacaagtctgttagatggataaatatataagtgaatgattatttttgtttgcccatgttgagctatgtacttaatatacaagaaatataattttaatatcaaaactattattattatattaatattactatagctacttttaatcttaaattgaaagatttcaaaatgcatttttgtaggattacttcctaattctttctctttgggtaaaagcacacaaaaattttccagttttaccatgagctgacatgtttttataacatttctgtaaaatatcactctaactagactacttgtttatgtagtagtatagtagtttccctttaaggaatgtataagaattatatattgctgttaacaaattaataagatttttgttgttcctagcatttatagagccctagatggccactgggaaattccttcaaatagtaatctaaaatatacttcagtaaagtgactcttgtcagtggcaataaagtaggtcattgtttatgattattaccaaattttttacatttcattgaattattttaccatcagaaacaacttatcaaaacacagcaatacctgctgaaatacacttttttaatctattaattcgtaagttgtataaaatggtgcatctattttataattttagattaatacaaccataatcattggtttatttctaaaaataaaaaaatgcttattatttttaagaacaataatatttattatttcttaaaatagcagttatcttttaatgtagtctgttaagcatgtttcatgtttaaaatattagattctaaaagagatattgagctaagtgaaactattgcttggaggaaaatggggagagaaagtggaaaagcaagtagtggtactaacatgaaccagcaaaagctgaatcacgtctaccagcaaatgacctgagtatcacaagtgttcctcagttagaaaacaggttattgatagggtatcctatcaaggtggaaaaggagagcatctaaaccacaagtttctgacatagctgttgacaaaggcttgagcaatacagctttattccagaacaagatggcctcagccttcatgaatggcccccaaaattaaaataagcatataaatcagcatagaagattaggtgttaaagccaagtttcgccaaagttaatgattccatttaaatgtggctattgaatgtgttcttgacaaatgaaaaagaatattccaaattttttaaaatgagtataaatagatgcttttcctaagagctagtctgtatctagagaggagacagaatcagaacgtggcagaaacagaaatctctctaaagtccaaataagtgaattttatttaaaaaaattttttttaattttttttttgggggggacagagtttcgctctgttacccaggctggagtgcagtggcatggtctcagcacactgcaacctctgcctcctggattcaagtgattctcctgcctcagcctcctgagtagctgggattatgggagcctaccataccacccagctaatttttgtatttttagtagagactgggtttctcactgttggccaagctggtctcaaactcctgacctcaggtgatctgcctgccttcacctcccaaagtgctgggattataggcatgagccaccgtgcctggcccaaataaataaattttaaatcactcttaagcaacctactggaatgacattatcaaacatccatcaggtacacttaggatgagagataggaagacaaacatgcttataactcatcagctctcaatataattagattttggttaaactgtaataagaacattgtactgcattaattcagttttgttttcttttttcttatgtcttcagtaggaatttattttgaaaaagctgtacacgacttgcttgtgttagagaatcattgtggtcaaaggttataggaggcaaagaaattcccattctagatgcagaagagcctgcaagctgagcaagatatatgtaaatgcaagatatcagaaacaggtctaggagtggatggtgacccctttctacatgttattcagctactgcaatatatgttaatcaagttgaataatatatgtcattcaaacctactaaacatcaagctacaatgaatgacactgtgaatatattttcattgctcctctaattatgtctttgatattgattttgatgaatggaactagagaaggcgtaaaagtatctgtattgctcttgagacatacccagtgccaaccatggtgtcactcacgtaataaacttttaacaaatatctgttgaatgagtaacagagtggtacaaatcagctgcaatgttgtggcaattacacatcaatcaacagcatattcactttcataaatgctggtagactaataataggtatttcaaatttcacatgtccaaaactgatttccattttttcccaaccataatattatcctgctgcagactttcccatttcaatcatcaacatctctatcctctgtttctcaggttctaccttcaaaatagatatttatggaaccagttccttctcaccacctgcactgttgttaccattgtgatccaagtctccatcacctctcacttagattatttccatagcttcttggctggcctttacttccatcctgtgccatctacttttggcatagccacccagtgtgatcctcaaaaaaccttattcagatcatggctttcctctcttctaagcctccattggctgccttacaatggccttcaatgccatagatgatttactcttgagctagatgactaagtaacattatcaaacatccatcaagcaaagttaagatgagagaaatgaaaagaggcaggatactctgtaactcaactgctctcaatataattagattttgattgagatacaaagagaaaattgtattctgttaacttggatttcctttttcttctgctcagcctacctcttactactcctccctttgctcattcttctagaaacacactggcttgtgagccatttcttaaccatgccaggtttgcttctaacccaggcttttgaattgctgttttcttttgcctggaaccattcttcccataattatttccatggctcatttcctcatttctttcaggactggactcaaatgtcacctgcttagagaagacttatttgacttactacttaagttttcccattttctagcattccttatcttcttttcctgctttatttttttctatagcacttacaaccatctagtggattttaatatacatctcccctagcccatgacaagaagaaaactacaggaagacaagtatgtttgtgaatttcgtttactactatacctccagaacctagaacaatgcctaacacgtaagagacactcaatgagggtgggtgcagtggctcacacctgtaatccttgcactttgggaggctgaggtgggtggatcacaaggtcaagagatcgagaccatcctggtcaacatggtgaaaccccgtctctactaaaaatacaaaaattagctgggcgtggtggcatgcgcctgtagtctcagctacttagggggctgaggcaggagaatcgcttgaacctgggagtctgaggttgcagtgagctgagtcatgccactgtgctccagcctggtgacagagcgagacttcatctccaaaaaacaaaaaaggatactcagtgagtacttgttagatgaatgcatgaatgtcaggaaagcctaattgccattactcattctattgctatatataaggcaatgataatttatttggctcatccagaaagctttagcaagactgataacaacccccagggaagaactcatgaactccatactgcccaacaaaatctttttcttggcttctccttttttgtcactcctcctcttttgctttcctccaccctatgctacctcctaataaaattccttgcttgaattctgtccaatgcaaggctcacaaaaataagttaaacagatctttccagacaacgagtgttttctactatcctggaatttcactgcaatacagtacatttcgatcacactaccttttaatgaaatctttaccctgaatactcaaaaagtcatcttctgtatgagcatgtctgcttttagtagacataaatggctagcctctgtgactgttttctttttaacaatgaaagaagaaacaaacacaatggacaattattaaacaatggacaattgattagaaaaagctcgcttgctaactgagtaattctttgacacacagttttcatctcattttattatgttaaaaaatagaataacaataatacagtaaaaccctgttttgaggcaccattatagtataattatggatttagttatacagcccaccacctcatatccctgatgtatcatatagctcagcatattacacaattcatcaagggtaaaaattatttttcccaatctaggcttaattatatattgagtatgctgctgaaaagtttcccctaccattatctcttctcagcataagggggacagtgtctgtacattgagaagttattggtattgctattatttttagcaacctatcatcatgcaccctcgggggtgaaaacataagttaacagagatgataagggacccttacacgtacagaagaagcagagtgtctggagctatatatactcaagagctatgaattacttcaagagaatccaatatgtactaagcaaaatttaaaattaaactgctcactgcaatttcaacagttgtaaagtaatgtcccctgtattcgtcaattttcatgctgctgataaagacatacccgagactaggcaacttacaaaagaaaaaggtttaattggacttacagttccacatggctggggaagcctcacaatcatggtggaaggcaaggaggatcaagtcacatcttacgtggatggcagcaagcaaaaaagagagcttgtgcaaggaaactcccatttttaaaaaccatcagattttgtgagactcatttactatcaggagaacagtgcgggaaagacccacccccaaaagtcaatcacctcccaccgggttccttccaggacatgtgggaattgtgggtgttacaagtcaagatgagatttgggagggaacacaaccaaagcatatcatcctctaaagaataataatgtcagtaataatagcaaaaatacatagtaatgatagcaaatagtaatagatgacattaaatgggcactactatggccactgatctaattattttacttgcaataattcattacagaaataattctttgcaggatctgaattttaggggaatacatgtcatgaaatctgaggatttcttaaagattatcatgctcccattaggcaagggaacactcatggttgttcttgtctttgccttcacctaagaaaataatgaagggtggtaaataaggataagaaggaattcatttatttattcattttcctgaaatacaaatgaaggatcgacaatagaaattaggaaaaaaaaaagaggggaagtgtagatatttcaaggacatagataactaatgagctaatgagcattgaatcactactatatgtcaggcacagtattaagcattctacaggtatttcattcaatcattataatgccaagtgaagtagggatccattatcctcttcatagtgaagagaaaaagaagcagttaaatatcttgactaaggtcatagtgaagagaaaaagaagcagttaaatatcttgactaagctaataataagtggtgaaaccgaaacaataatcttgtcaatctgacttagctctcagacatatactacgagcatgtttaaccttatttaaaatatttttattttttatgtgtttccccatgatattgagcagtaaaaccttacaataaaaagagactaggtggttttcctttagggcaactaggaagtagggaatagggaaacagcattccattccacagtctactttgtagagagagaccagacagcaggcaacagtagaaaagaagaaaataaaacaggatgttttaaagacctattataagcagataaacaaaggaaaaagcaagaaaaaaggataaaattttcctactttggtttttttattttatttgttttgttgaaattccaaaacttattctgagtattatttattacttgcccttgaaaacattaaatcgatgatctgttggaagattaagccgtgagtgtacagtatatccacttaagatgaattaaatccgttatttgtaaccatgaaagaaactatatgtttttattttctttttttgtcaccaactcaaaatgcaaatacacacactcatacacttaaatttagtaaagagaaaacaatgataacaatggattgcagctcaaatatctacacatttctcatgagcctaaataatttgcgagcacaaaattatactagtacttggttacatttcaggaaatattttaaaaaattgattaacagtgatttattaatattttagaatagaagattattgaatgtgttgtagataataatcatttgtgagcacaaaagtatactattacttggttacacttcaggaaatattaaaaaatattgattaacagtgatttattaatattttagaacagaagattattgaagatcgtgttgtagattctatttattttctattaaatccaaataagatgtattttccatgaaaactaggtcttacactgtatttgaatttaaatcctgggatcatattaatgcagaaattacaagtgtgtcatttagcacataattttcccagatggagacattttgctgaatagcaaactgccaaattgaatgtacagcatatgataaaagcagtttgagcccaattttccccaatgaaatcaaacaacaaattgtgttgatttaattgtgaacttatacttatggattataacatgaaggaatgaatttttcactttcctgttacaccattgcctttatttcccatccagaattacagaggagttgtaaggcaattaagggtgttacacagggcttttgggtgcagcactggaattttaaaacaggtttaatggcaatttttgataagtaatatactgtaatataccttttaaactctacatggactttaaaatcttttatggaaaattctcaagtttccataataaaaaaacgctctgctttctttggggaatatttttgggaaaaataacttagttcaattttcatggaaaaaatacctaaatagtagtattgctgttcaaattttgtcacatttctttttgtgggtcttttgaagtaaatcaacaggtttatgtaaacattatgatttggcttctcctagatgttagaaagaagcagtgtgtaagtagtgacgtacttgggctttacgtaaagaaattgtgccattatttcaagccagatatagcttctgtatcaacaaatggaacacaaatctttagtctaggacttaagagtgggggaaaaagggaaaaaacaactataacacttaaatgaagtctttgtatcttaggtttgttgaccagggtattatacatatctaatgctactaaaattatgatgttattgaatactcaagttaattcaataagtggtggttatctgtagtaatcatagagaaaggaactattactatgaggcacctgcgggtacagcaccctagtagtaagttagagtagaggtaagtatctgagcagcccattctgctttcctgtgaaaaagcaggtatgctttcctgtgaaaagcaggtatttgctaagcacaccaaggtctaagaatgatacacattgagaagtttgaacattattacatcttgatagcagttatgaaaattgttaaatgaaggttcttacggtgcacttagaaatcactctttaatccaagatgtgattttcatttccattaagcttccacccacacatactaatgtcttcttaactttctgtataattccttggccttttcatatagtatcttaggttatgttagtctttaatttctatctgtttacttataggacacattcagctacctgttagtcacaccacaaatctttgtgcagacacttggaatctattcctaattgccttcacagttgattatcgtggagtcagctacataagaaagagccactctaattagtgcagctgattcctatgttgagctgctaacatcgatctgtttgaaagtcactttttgtgcatttacactcaagttcttaagcaatgatgacagcagtaccctaaatattaaaaaagaaagaaagatagaaaagaaaaaagaaaagaaaatagcgtagaaaagttgggtagagtttattccatggcatagtcattttaaagcaggtagtttttgagaaggtgttttttgttgttgttgttgtttgtttgtttttgttgttgttgttattgttgatttgtttgcttgtttggagaaaccagcaaagtagaactccaaagtccatcttttagcattgtacctcaggattttcaattcagacacaatgtatatgggttgtgtctgatcattgaatgcaaatcattaaaaataactatatggagccaggaaataagaaaacattttatggctctctagaagacagactgggtgtctgcttctgcatgcccttttcttttctttctttttttcttttttttttcttagtctctaggataatgctgacatcattgcttaaagttctgaatgtgactgagaataatcatttcacagaaaatatccccaacgggtctgtcatctggcaaacagctaggaatatcttttgacgtcttgctttgcagaacaacaataatctctcaccacctgtcaattccacatgtctcatcccctgcccctggtgattcttggcaatcagcagccagtgcctgtctaatagcacttctgcctgcttctagtgtagtgcttcaaactgtcctgtttctcagagagcagacacattgcctaaaatgaaatcttagaggtactgtccacactctgtcagtagacaaaggaatcagaactactcagactgaaaataaggtgcaagggggtgtaatatggatgtaatatggacttgcatacatgctcctttggcatatgtttccctccataaaaaaattaagttgtaaaatatgttaatgacatcattgaggtagataaaaaggagcaaagaaagccaagaagtttcacatgatacattttgaatttagcaaaatgtggttttactaggaaacaatcaaatgtagatgaaaatcaaattcattccatatttctccccaggaaataatgattaataagtgagtgagctctgaattcaaacaaactttggttaatgaggaaaatacaagctttgactgtaggcaatggtcttgacatatattttttttcctcctttctggaataactcttgcctcatgattcattggtgggatacctatgaatgaatagttgcataatggtgaagagattgtgtatgtattttgtagcctttcattttcttctgtcttccctgattagtcatgtccattacccagctagctctaaaattcacatcctaattgctcattagtttagtttagtgaaaaatgatttaaaaattattattctacctttaaaaaatctaatagccattatggtcgaaggataaaaccactaaacattacatttaagaaacataaaaatcatatttaatatagtgggaaatatttccaactagaaatggcatagatgagagatttgtttaaaacttatatatactatgaaagtacaaatgccaagcagcaaaacttgtttaaaagtcagtattattatatttgaataaaaattctttgataattactaagcaaatttcatcaaatgggtttttagcaatttaaaaaaaggaatgcaatttgaaaattctcactacattttaaatgtagacatttatgggcaagcattaatcataaatatcaacaagttacaaaaaaaagccgcacaattttattgcatgaaaatttgttttatgcacatatctcttatgatatatattcagagcacaaataaggataagtatctagatgacttattcataagcaagtgatatgtatgcgtcacaagataaattttatagctggtaatgtttgctgaggtttctcaaatggcattgaagttagtcaaggtcaaacttcaaatctaaactttaatcttacatccatttcaaagattctacatgcacacacacacgcattctagatacccacacacatacacacataaacacacacacacacaggcagaaatgcacttacaagttccagccttagccactacttgggtcagcctgcctgggctgtttgtgtgtgtgtgtgtgtgtgtgtgtgtgtgtgtgtgtttgcaagtttgttactttttttttcctcattacttttctatttcttacccactcaaagagctgcaggagaggtgggctgtgtgggaaaggggcacatcctacctcacttgtacattgacactggagcagtcaaatgtcactgctcttgggggtcagttcctccagctgactatctcctgttggtgcctcccaggctccttggcaacctctcctctgagcatcaccgttctgcagttttctgaggcattccctccacagcaaacatcctgccactcagcctctgctccatgtgcatatcaacatgcagcccccgacttggacttgcttagtcctacctggtggccacctttagttgggttcatagtgaaggatctgccttttcttctatgtactcccgagcctatatcctgccagaattgtaagttctattcagacacctgaatagattgacactggtttctatctcctggaccccagggacccacactcagttctccaaagcatcctctcactgtggtccccaaagcattctctgacatcatccttctaccaggggtgggttaggaagtagaaagcatccacttctttccacctcctgttaggcagacaactatcttcacggaaaacagtacttacaaattcagcaaatctagcagacgatattctagtacttctgtataaaatatatgcataaaatctagtttttgcctgagagtgaaaataatggataatatccattgtaaccacccattagacagaaaaataggtagatatagcaatctgcacatatagatagatacatagatatgtagatatatagattataggtacatatgcacagatatattccaaagacttttgccaactgatatgacttggatctgcccaaatctcatatctaattttagtccccattgttggaggtggagcctggttggaggtgtttggatcatggggatggatttctcataaatgttttatcaccatccccttggtggtgtccttgtgatagtgagtgagttcttgtgagatgtggttgtttagaagtatgtggcacctctcccccgcccccacccccactctctttctctcttgctcctgttctcaccatgtaatgtgcttgctccctatttgccttccattgtgattggaagcttcctgaggcttccccagaaacagaggtcattgtgcttcctatacagcctgcagaactatgaacctattcaatctcttttctttataaattactcagtctcagttacgtatttatagcaatgcaagaacagcctaatacaccaactaaagatatgttttgtcattaatgacttgaacattctcaactattcatggcatttaacaatgcttcattacaaaaaatggattttttacattttatgtgttttattcatgataaatgaaatgtgctttattcatgataaatttatgtgctttattcattacaaatgaaaacttgttcttttcgtttgttctttttatcatgaataaagcacataaaatgtacctttcacgtttacattgcaggcccttttattcctctcctgcccttaacctccccaaacatatacatcaataaagaaaagagaaagagaaatgaattagcagtgagcagtaagtggaaaagatacaagttttttcatggccaagtctaaagtcattttgagttaattaaacacaagctactactaagccaatagaggacatattaagtctttaaaaatattaattgtgatttttctacactagatttctgttgcttgatttctcattcatgactaaaattgttaaacctgttaaaatatagaaacacttgggaaaagaatctcaaaacaatcactcctgaaaagttggcatcttccctggaagtttccagtgagctgagttattctcattgcagcatgaaggacacatagacccatagtatcattccttctgtttgtctttgcattatcattttccagtctatggcatacagcaactattcaaatgttttttggataccttcattagctatggcttccaaacttttggttaaaatagtaagctaagctgagcaagcaacattttggccttttcatcttattgggcacactggtcatttattgcccctcccccactctattcctctggcaccagcgccaagcattccctggatggggatttggctgtctggctagtggccacttcactgcatgccacacatctgtgcccttggaatctgaggccttgtcttcattttagggcactagaaatatttctgccaaaactccaaaagttgtttctttcttttctattcttctctttttttcctcctttttcttttctcttttccttcttttttaaaaaatttctgagaacaatataagctacacatacatttgatggtcaacagctgacactactaggaaacatatgtgtaagagtagatttcaaaggccttaatgcatctcccagctccatctctgactctgtaatgttgtagaagtcacttaaatctctcatcccctgtcgacttaactacaaaatgagaccagttatagaattgtgtgagaggagaaaatagttgatatagatggaagagctttgaagattctgcactctcgcatatgcattgtattagtattactattaggtcagatggaccctcatctatgactgaccaagatgttgggtacacgagctaaaggaatccaattcactatcccagggttgcatcgcagtggatttcatacaggctaagaaaaaacaaaaacgtttttaagcctccatcctcagatcaaaacaataaacaaaaaattatgatatccttaacaatgtcctgggttaatattttattccacaaatcaagatttcagaactctttaccctctaagagatagagattgaacatgcctttataggctttgaatttcataacttctaatctatgctcataacctggaaaatgtcatcatactgaatgcgctcatgaaaaggtacttttaggacctgccagtgacagtttatacacacatcagtcccttttcaaatgtcatttccattagtatcttacatcagaatcacaagtgaaatgaacatgctgtaacctagtattttaaaaggttatgttgaaggagtagagaggcttaaattaattttcccttttctaatccagtaagcctttactcaataggatttcctataattctatcttaatccatgtctctgtggatgaatcaaacagaccacaacatagaagagcctgccaaagtggcttcctgccagcagccctctctcctctttaagatagacttcagattaatgattgtacagtgatccaaatcaatgaagaaagcaaagaacagacaggtatctcattatcttctgcaaagatctatttgtttagccatgttcaaatattgccctaaaatggtaagttggttagcacatattaatcatttactagatctattcaattcctaaaattaacgtgaatttaatatgcagggggagttgcatggctgtttttgttgctgtagacttgatataggcagagaacaagcagaaaattatttagaatatccagtggaatccatcattatatttttgagactattaattagccaaagattgtaaaattattttctagcaataccagttaaatgaagtagaaaagttaaatgaaggctaaaagcccacacaatgctatcatgctctaagtattgttctcaattattggaagtacatatattatagaagctcagtatgtatttcctaatgaactgcttcatgtgaattatttcatgccataatcttatcctttcctatactttggcaactgttgagaggctagaaaagactgtattatttattctgaggccaaaatataatcatacttgggtaaaagatactagatgttcatccactgaacatttattacagcaaattttcataatccataacacttaggatgtttacatctaatttttatcttgattgaattcagcattaataaatatgaatttttttcactaaaatattatttgggctatgaatatcctggcaaaaatcacccacataagactaggtttttatcaatttataaacgaataggttgattttgaaaaagttatctttttaagtatctacaaggaatttagaaaatgcaaaatatcttataaatttgcatttataagatatatgcctttgaaatttattgagctctgaaatgtcttgttcactaaatggcctagagataattctccatgattaaaaagtttctttctacaggaaactttttcagaatatgaatcaataaaataaataaaaagtgtttatttctgtatcttatgtagaaattattactaaggtaggaatgaatcctctcttaacagtctatacaatcactttattcaatcacttatatatttaccaagaaaactacaaatcttatactttgtatataggaaagactgttaaagtatgagatatacccatattgtaatttatttaagaaaacataactaaattatgaaaaaataatcaactttgtgatattgccctatgtaaaatttcttctacttcacagtctatatactacagcttctctataaaaaattctctcagctcttcaagatcttacctacaaataaaaatatctctacattcatcattatttttttcctattacctaaaatgaaattattctctggaaattttgctcttaatacgccttccttactaatacaagaaggaatgtatcttcttgtaattccagcccagccttttgagaggctgataaaggaggatcgcttgagcccaggagttcaagaccagcctgggcaacatagtgagactccatctctacacaaatttaaaaatttaaccaggcatggtggtgcattcctgctgtcccagctactcaggaggctgaagtgggagaatttcctgggcctgggagattgaggctgcagtgagccatgatggtacaactgcagtccagcctgcacaataaagtgagaccctgtgtcaaaaggaaaacagaaaaagaatatccaccaggaaggctgcaaccctttataagaaataagtctctcctttccaaatttatgaacctcatcattcttcaattgacagaatcctctcaatttacatgctgcacatattttaaaaattcatggaaattgacatttctttttcattccctggtatctatccccataacttagaaatcagtcatgtgtgtctattatgcaattttctgtatttcatcatgttttataggtatttgtgaatttatattgccttactaaaaaatagtaccttcttgaaagctgtctcttgctatatattgggtttgtatctcacatagtgtcacacatagaatccttcacatagtggaaatttgccagaaacaggaaggcatgaagacccattcattcataccacccattcaggatcatcttttcatggagaattatctctaggccatttagtgaacaagacatttcagagctcaataaatttcaaaggcatatacattcaacaactggatcagtattagctgaagacagttttccagagatagtttagaggtaccagtgctcagagattctaaaccagtatttctgaggtagagtccagtagactacacttttaaagaactctacatacttttttaaagcctgtttcacagcaagattttagaactaatgaatattttacatgacaaattttcttaaagtcttggggccttaatattagcatgaaacatgagtaaactatgacttggagtaaataataaaacttgcctaagtttattgaattataactcacatctggagtttggggtcaatactaccttttactataccacaattgccttccatggaaatacttttttgtttaattatgtttatcactttctcaggagatattattctagattcaagcctatctaacactccccctttctcctaaagttttggtcaaggttttatttgcttgttggtttaattctccactgtggcttacttgagcacacagggaatctgtcttcttttcttcccatccctaatcctaacctgatcctaatctattacctgagaaaaacattcatatgagatcctctttctcctaaggaatcattttgtatatccagctttttctaaccacttgtagtaatttaaccaattctcctggccaacacttgaattaaagtgataggacaaattaattcacactaacctgctaatgaatataaagaaaatatagcagcattctcccaaaatatataagaattcagtgtgcttatacaaaaattgaagaaagtacaatcattgagtgataataattttgcctagaagaggtatttagaaccatttatatttataatgcagctaacattttgactggtgtattaatatcatccagagaaacagaaacatatatacacacacacatatatatatacagatgtgtatgtgtatgtatatacacgtgtttatatatacacagatgtatatatacatatgtgtatgtatatgtatatatataggcacatatagcctattgataattctggagagagaaagagagagagagattttaaggaattaggttacaaaattgtgggagctagcaattccaaaatctgaaggataggctagcaggctgaagacccaggtaagagttgatgctgcagtttgagtttgaaggtagttttctattaaggccttcaactaattggatgaggcctaccaacataatggaatgtaatctgctttggaatttaatggaatgtaattgctcaaactcagctgttttaaatgttaatcttacctaaaaaataccttcataatacatgcaggatcatgtttgaccaaatatctgggtactgatgtctagccaaatgcacacataaaattaaccataatacctggtaatacataaagaaaattcatcttacaaatcaaaataatctgacattaaaattaaggcaatgtatccttacggagtgttattgtacctcatcagacagcttaacatgaaatgagactactaggacagtactgatgagaaaaccgtagtatagagaaataagatttcataataacatttcacaaacagaagttcaggggcctgcaggatcagaaactcaattatgtaatcatgtttttttgtgagatttgaaaagcagctttgtaatttattccagggtaaccataaatctgaatttcatagacaaacttctagcagcagcaaacacgtgcatttgaatgtattctagacaaaacagcagagtaaaatataataaaaatttcaaataaactgatatctagttctttgaaaaatgccgtaatgcttctaaccctctcttttctctatatcttgtgtatatacgcaagatacctaaaggaacattagtgtgctctttcttcaatcaccttacacaattttattcttgtcttatttttctttttcacacacaaacacacacacgcacacacaaagtgttttcgaagctcagtatgtatttcctaatgaactgcttcatgtgaattatttcatgccataatcttatcctttcctgcactttggcaactgttgagaggttggaaaagactgtattatttattctgaggccaaatataatcacacttgggtaaaaggtactagatgttcatccactgaacatttattacagcaaattttcataatccataacacttaggatgaacttcaaagcatgtatgggtgtcttgatatagcttgtttgcttaagtaaaagctatgataaacttaatttatcttgaggatactggaatctgtgagagagtgagagatgttcctagatattatttttggcttaatttttcagtttgtaaaacaatcagaaccactcagcggctctaggactgatagaatagaggtatgaagtcttcaggaaacgtacgccttctaacatagctggacctgaggtccaggtccagcactattacagatggaggacgtgtgtctagtctcaagtagggggattggccaaggaaaactgcgtcagacaaccaagtcaggatttcaggcacaatggtgttatgggatccttgggggtgtagattttctggcctaaaacctctgtccagtggtgccttttcctgagttttgctcagctcgctgggctagttccacccactcagcctggcaggctgtgcttggctcaagctactagcctgtatcccatgcctcccaagggtgagttaggcatggagtggtgaggggtgtgtcagcaagcgtgaggtccagcctctatgcagtcagacccttcagctactgcaatgcaggcagcaccaggtgcgggcatgggtgccagctctctgcaaggctgcagctggacaggcaccccacaagcagctgacactggagaatgtggtggcacccagaagctctgagatgccaggaaccacagggcctcaaagagggactaacagccctggttcggagagctcccaggtctgggctcctacaagggctgtagctcttctctccctctccgcccacaacgaggtgagcaaagggcatgtttcagtcctgtttgtgggtttgtggtacagctcttctagacttgccatttggcaggccccaagttctcgtcctgcaaccagaaagatgaggcacacagacaagtggaggatgagcaagaggaagaagagctttattgagcagtagaatagctcagagacctgctgtagatagctcttttctgtagccagggtgtctggacgagtgttcagctctcagcagagtgtagaaagccctgggttaggttgctcctctctgcagacaggtctccctggagtggaagctcctctctgccgctggttgtccctacattctccagctatcagcaaagtagctcctagctcctctctgcagctggttatctgcttctctgctctgctgtggctgagcccagggcttctgtgggcctcagagcggggaagggcatgctgattgttacatgggcagccatgggcaggcccacgtaaaagcaccacaagatccccctcagactggcagcctgcccccaggcttcagaccttccccggcctaaaggcggggcttcacggggacctgcccccttctgcccatgaacctgccatctttctactgctgttcaaggcaaccaggctgcctgactttgctcctatctcctggcacaaaaaaagagagaaaccagacatcaagaacaggcacctccgagcctgcaaggacaggggccttcctgagcgagagtgcagggaggttttcccaggcctccaagagtgtaaggatgcctgagtctgtagccgctgtttgggcagctgcagctgcacccgggagtggggcaggactcctgcctgctccacggagcgaggctgggtatgcagccctggtttgggcagctgcagcagcacccggggagctaccaccccaactcagaaggggtggggctccagcttgtccacagtcccctggctccacacagtaggcagccccaaccgcgcctccctgctccagccgggtgatggcagtggcaggttgtctggagggctgctaccatcacgggaaccaaatgaaagtaaaagtaagccacagtgcttagaacggtttcagacaggacagaagccaaattacaaaaagatggaggcataaggtcaaagatagactgtcatatcttgatttaactaattattgtatgaattgaagaaatgaatgccctagaagatagcagctgagcctgaagatctgagtaaaataaatcagtaagtgggagagaagaaacaagacagtaggaaacaaggggccaagacgtaagttaggtgtggagtacccagtagctctgtcaaagtgggtcagtaactgtgcaggtcactgtagaaaatgttgacttcaacttcctctttaaaatccttctggaatctgtatttaaaaatgaaacaacactatcctaaacattttatgtggatagaaatttgttttcttccccagatatgtttgatttgtgtcttaagttttaatcctttagatattttggtaccataaacaggaatgcagttagtacagtgtattttgtagacaatagaaaacagcaagtatatttttcaaccctaagaaactgtactgtaaagtttggtgggacttctgtatccaccacatttaaataaacttaataaagatataatctgacactacaaatgctacgtaacatatatagttctttttttttttttttgagacagagtctcgctctgttgcccagcctggagtgcagtggcgcgatctcggctcactgcaagctccgcctcccaggttcacaccattctcctgcctcagcctcccaagtagctgggactacaggtgcccgccaccacgcccggctaatttcttatgtattttttagtagagatggggtttcactgtgttaaccaggatggtctcgatctcctgacctcgtgagctgcctgccttggcctcccaaagtgctgggattaccggcgtgagccaccacacctggccacatatatagttctaaacacacacacagagacacacacagacacacacacacacacacagagacacgcagacacacacacacacagatgcagtcatagtgcactacagcttcagactcctggactcaagttaacacactgttttctcatggtgccttcttttcactgcccatccccctttgcaaaatgttcagcaatatactctcagtgacatattttttctataatttcaattccattcaagattaaatatatcggccaggcacagtggctcacgcctgtaatccctgcactttgggaggccaaggtggatggatcacctgaggtcaggagtttgagaccggcctggccaacgtgatgaaatccagtctctactaaaaatacaaaaaattagctgggcatggtggcaggcgcctgtaatcccagctactggggagggtgaggcagcagaatgacttgaacccagtaggcagaggttgtagtgagccgagatcgcaccactgcaccacagcctggccaacaagagcaaaactccatccctgcctccccccaaaaaagattaaatatattgctattcataaaattacctcaaatatcaaaacctgtaatacagtaggctttgggcattcagaaggaatcctgagacctctataaaatcttaaattcacaaagcatgtaattttctccctaaaatatggacaagacataacaaagtgccacaaaatcaggtcaagatgtagaagcttggcagattgtgtgcataggccttgagttaattcccagaagctcttacaagagtatcacaatttctcaaattagtgtcttagtaaaattaaaatgagattctagggtctttaatcactaattatgaagaatgttatatgtctgacctatagacgttttaggaatttgaattttatacaatttttgctaatagatccctccattcttttcgagtaaagcccactatcttcatccgaaaaaaaaagaaagattttctcagaaaacccttgtgtattgttggtaggaatgtaaattggtacagccataatggaaagaagtatggaggtttctcgaaaaattaaaaatagagggccgggcgcagtggctcatgcctgtaatccccaaactctgggtggccaaggtgggggaatcacttgagcccaggagttcaagacccacctggccaacatggtgaaaccccatctctattaaaaatacaaaaattggctgggcatggtggtgtttgtctgtaatcccagctacttgggaggctgaggcatgaaaatcacttgaacccaggaggcgggggttgtagtgagccaagatcacgccagggtactccagccagggcgagggcaaaactccatctcaaaataagaaattaatttttttaattaaaaatagaactactatatgacccagcaatccttcttctgggcatataccaaaaggaaatgaaatcggtacttcataaagatatctgcactccaatgttcattgcagccaagatatagaaacaacgtatctgtatatgaatggccagagaaagatatcatgatacatatacatatgcacatcatgtaatggaatattattcatcctttaaacaaaagaaggtgatcctaccatttgagacaacatagataacctggagaacattatgctatgtgaaataaaccaggcacatacaaaaaatactgtgtgatctctctcatgtggaatctaaaaatatgttcaataaacagatgtagagagtaggaacagcagttaccagagacaaagtgggttggagataagaagatacaggacaaagggtataaaattgcaattacttaggataactgtatttaggatctaatatacagcatgaggactctacctggtaatagtgtatgccacaaaaaagttaacaacatgagatgaacgatatgttaattgtcttgacagtagtagttttaactatgcatatgtatatcaaaacactatgttacacactttaatatataaaatttgcaggacaaaaaagtcctgcaaatgttcctcatgctctttctacttctagttcacaggttccaggataaccagatgactgaggaatgttgaagattgcagtgatggaagtgcctcagtcagcctggaagactgtatggatggaggttgcctggtcacactgtcatgtccctctctccctgaaaaagagacacatttgcctttgtgcaaggcaatacatacatttgatctatgtatacactttggtctatgcattctgttatttaacattctaataatgttgatgaccttaaaatatgcttgacaatgatccttgtaaatcattattattctgccttctgcaagataagaattatgggccaggtatggcacttaacgcctataatacaaacattttggaaggccaaggcaggaggattgcttgagctcaggagttagagaccagctggggcaacatagtgagacctcatctctactaaaaataaaacaaaaaaagttatgagagtgacactgcactccagcttgggtgacagagcgagatcctgtatccaaataaataaatatctaatataggaattatcaaattcaacacatattaattattttcatatccattaatggaaaataataatgtggggatgattcttaaaagggattctggaagtggcttcttcaattaaatatattcaaaactcattcccgcttactacacaagtcaaagaggaattgaaaatgtgtgtgattcccactaaattattttcctttcatatggcttgatgttactgtctttgtggagtggctgagaaatgtctccttcttgcctttatcttcaaagcctctgccaatgtgaagtacaggagagagaggcaagagcagggcccactagtggattcagctcagccttattccccaggggaaaacacattctttttcactttcctgagctgccttatctgataaaaatgattcttacatctcccagcaatgccttctgattgtaatgtagtttatgccactggtttgcctatttctcaaatataaacctacacacacgtacacacatttggccttagcctttctaattccactctcatcaggacagattgcacacctgtaaacattcttagatcaactccagtaatcaatccacattcatgtaacccctgcagaataaagatcattggagaccctcaagattgacttcccatttaaaccgtaagaaaacaagaccccaatgtgtcagctgcagaaccacaataaggacccgagtcccatgtcttattgttcagtggtttttctaagtttcaagtcttcttctcagtaatggtaaatactctctacggccatatcatcctgaacatgcacaatctcattaacgatggcaaatactttcttccagatgctgatgtggaaaacctaatgttcatccttgattaatatttttctcttacatcacatatctcacccacccctgtaccacctgtttcaagccatcatcactttacacctgcattattgcaatatcctcctaagaagctgctcttttttttcaccacctccaacatcagctcttaacacagcagccaaaatgaccattttaaaataaaagttagatcatctctctctctcagtataaaccctctttctcagagtaaaagccaggtctaacaatgacacctcataattgtccatcttatctcctgacctcatttcttacctctctccttctctatctcttttccttataccctggaatccttgaacttgatccagactcaggacctctgcctggaacattctactctctgatagctctagaactagaatataaggtaaataacacttgctgatttgaaaaatatactacaaacctaagtggtttaatacaatgtctttttttttttggctaatattacagtccagtgagaatatgacagcacctctggttagctctcttctaagcagagattacgtccttgattttggtcccaaagagagaaagaaaaagcaaggagaagagtacagtgagttttaagagtctgacctgtaaatggcctatatttttccttcccacatttcaacaactactgctcagtctcatgactaatctatctgcaaagagataaattcagaagcacaaagctagcctaaatattagaatgcccccctctagatctctgccacattagtcccctgctttccttaggaagacaaggaaaactttttctggctaccctgcttaaaagagcagcacttcctaaattaaacgttgctcagtgatctccaatcctgcttgtttgtttgcttgtttgagacagagtcatgctgtcacccaggctggagttcagtggtgtgatcttggctcactctaagctccacctcatgggttcaagtgattctcctgcctcagcctcccaagtagctgggattacaggtgcccagcactatgcctggctaatttttgtatttttagtagagacggggtttcaccatgttggccaggctagtctcaaactcctgacctcaagtgatccatctgcctcggcctcccaaagtgctgggattacaggtgtgagccactgcgcccggcccaatcctgttttttttaatgtccctggacacccagctcaattgcatgttttgcttttcttaaagttaggtgaagtcaggcaatggagcttttagacaagaaaatgcatataaactgagtggaattgatcaaaccttgtcatcctgcttccttaaaatgcctgtgtgctgttctctacaccctttcttcaaccaccaactgaacacagggttctagagttctcaggagggcagatacaagagagcaggagggtgggttcctgaatgaccacatggaaggcttcccactaataagaaatcttagtattggacttcacataaacactgagaaaatggctctttgggaagccactaaaattttttgatttatctattatagcagttagttatagccttcccatttcaatgtcctatttctctgaatgtgctttatttaaaaccacatcacttatcaccatctgacatattctgtatttgcctgtcactttttctcctgtatcttctgtccagagaaagtgttggccaactataacccaagagccaaatctagcttgcttcctgttttcatatgtaattattttttggaatatagccacagctattaatttctgtattcagagaggaggagctgtgtctatgctacaacaggagagttcagtagttgcaacagagaaactgtatgatctacaaacaatatttactatctggccctttacagaaacagtttgccaatgtttgtactagaatgtaaactccaagaatgtaaaacctttgtctctttagtttgctgttatatacccagcattagaacagtctctggtccattgcaggtattcatataatatttgttaaatgcataaatgaataagtgaatgagtgtgcagtaggccaaaaatgttccagaaaaaaaattcatatctaaatttcttgaacctctgaatattaccttacatgaaaaatcagacaaacaaaaatcaatcattgcatgtgattaagttaaagatcttgacctaaaagattatccagtattagccagatggactcgaaatacaatcacatgtatctgtataagagggaagcagaaagaaatttgaccacacagacagaaaaggagaggggatgtgatcacacaggcagaggttagactgatgtaccacaagccaatgaatgttggtggccactagaaatattatctaaaggattaggaattatctgtttagaactttcctgatggccacaccctctaaaccccctgatactgatttcagatttatgacatccacaactgtaaaagaataaatttctcctgtttaagccaccaagtttccagtaatttgttacagaggcagcaggaaaccaatacagaggggaaagtgacttaaaactacttctaattccaagataatgctcaaaatgctcatgcaaaaactacttcttgtgtcaacattcagtctatataagtgctcttgaaattaattatcactataattcagtctcatgaggaaaaatattttggctttttttgtgaaccaaaaatttatagcaattcataagttatagtttatggatgaaattaaacatatttgagattatttttatattagcactttataaatcagttgctgaaatagtctgttttgaaatattagatataactgccaggaataattctgatattttctttaacatattttagtcatttcttgaattgcattgttttatgatcataaattctcaaactaataaaattaattgctgttgaaaaataagaattgtgaatgtcttctgggtgaaggctgagcatgtaaaaagtttttttttttccttaataaaatgagactcaggggaggaagttcccttcttctccttcagagaatgtggtcatgatcatttctccctgcaaagatctggaaaggctgcagccgttttggaaatatggacttacacttggctgataggctgagtctgggagagtgcaaagatgaaaaaacacctagcacatggatcgtgtcactgagctactgaatcaatcatggaaccacgctccatctgtactttgtgttctctcatagaataaatattcactttgggttgtgtatccgttacttgaagctaaaaatctccccatgtaggcaatgatcactacaatgggttacttacgtttctgagtaatgtattcatttaatgaaaaaaagatagagcaaagtcctcaatcatatttatcaattaacaagggtctgactaaatctacttgaggttccagggaaataacatgggaaccaagatatttaattgtccatctgccatttgaggatttttttcccccacataaggaatcaatttgtgtagccatgatggtgacttcagctgatgccactattgagcactggctgtactgtttaaatgatatactaaaatggacaaatgggcagaagcttcttcacacagagcaaatctatctctggtttgcatggtaactttcatgcctgtagtagaataaacttcaatatatcctttttataaaattgctctgaaaatggaagacatcttaaaatgttggcatgcactcaataaggtggtattctctccaaatttaatataaaattaatgttttaaaattgacaacatcttttaatctacaaaatacatgtgccccactccagacctactgccacattgaccctatacctactaatctaacaaatagtgagcttgtttggattttgccaaaagcaaatatttaaacatgagaacagttaatattcccaattgctgcttcatataaaactaagctagcattaattttatctccctgtcttgttccttgtgcactgttctggctctgtaggaatactagactttgcatgagaaagctaaggattcaactgaagatcatttattaagttggtgatttatttaagtacatttattgtcattgttttgcaacacataatacaatttccaaaataactaggaattgttttcttctattttatattgttttttgaatttcctctatgaaggaatcatttaaccttccagtttacgcactatattttttacctcattttgcaacagaaatgttttgaaagttgtagtctgaaacccagaattcagtcttagctccacaacttagtagttacttagctcttccaatctgtgcatttgcatatgtttggggataaccgtaattaagataccttaccttaagtggtaagatttggggattaaatgacaaaatcagaaaagtctttgtttgtgtttacgttctgtatacagatgttcctaggttttgttacaattgtaataaaaataacaaaatcaatgtggtgataataatgtcttatgtatagcaagaaactgagtaattaaattttgtcttctaatatccaaacaatgaccaaattgggtgtgccccaaattttttattgagactgaatagacaatgtaataatattaagagatggggtatttagaaggtgatgaagggattcgggcccttataaatgggtttgagggtgtgggtttgttcccttctgtaccttctacatgtgaggacatggtgttccttcccttctgaggaagcagcaacaaggctacattcagttcttttacaatggtttcttcttttatctcttacatagtttcattctaagacagaataaggaatgacatattctgtgagtttttgcatgattaagtatgccagtactgccattttgtacttggataacaacttgcctggttataatattcttgagacacacttgttcccttagaattttgtaaatattgttctattatcttctggcactttatttttccatggaggcatttgtgcccagccagatttatcccctttgtaagctcttggatacctgatgaattctttctttatccttgaaattcaatcactttaccagagtgtcataaaattggttcttctaatgaatttcttgagaacagtatacctctttaagtctatgagtattattttacattttagaaatattttcttctattacataattattctttttaatttcacttgttgggcttttttgctggtgaatcatttacctttattttggatccacatttcctgtataccattagcgttaacttctttctgattacttttttttacccctttatttcactgagactacttcatggctttttctgttactaattttgtcatccacactgtctaatctgttttctatggtttccatttaattatctctgtaatgttgtcattttggttctctgctcaattaactttacaattgtctgttgagtttattcacattgcttatatatttgatgtctttttaaattaaagattacattctctttcatttttcttttgtgaaaatgttcttctgtttttttctcagttttgtaagaataacttaggctctttttgtgctttacatctgtcttcatttttaatgtagtattttgcatgcttgcatgacttgcatgctagcatgacaaccaaagaaaaattaccaatattagaaatgaaagttggaacatcactaactagtctatagacattaaaagcacattaaagggataatattaataactctatgataaaaaatattataacttagataaaataaaacaatttctcaaaatacacaagcttctgaaatgcaaacaagagtcattagatcatctaaataggtctatatctattaagtacattgaatcaatttattagtcacaatacactagagaaacagaatcaaaacaaaaatcaaaagaataatccacctatctatctgatggtttggctctgtgtccctacccaaatctcaccttgaattgtaataatctccctatgtcaagggtgggaccaggtagaggtatttggatcatgggggctatttcccccatgctgttctcatgaaaatcagtgagtctcacaaggtctataaaggtttataaacacctggtatttcccttgcttgaactcatttttctctcccaccaccctgcaaagaggtgtcttcctccatgattgtaagtttcctgagacctccaagccatgcagaactgtgagtcaattaaacctcttttctttataagtcatccagcctcaggtatttcttcacaggagcatgagaacaaactaatgtagtaagttggtatcaggagtggggtgcttctgtaaagataagcaaaaaagtggaagcaactttggaactaggtaacaggcagaggttggaacagtttagagggctcagaaaaacacaggaaactatggtaaagtttgagacttcttagggacttgaagggttcataagacagaaagatgtgggaaagtttcaaacttcctatagacttggtgaatggcttttatcaaaatgctgttagtgatttggacaatgaagtccaggctgaggtggtctcagatggagatgaggaacttcttgggaactgtagtaaaggtcactcttgctatgcttaacaaagagattggtggaattttgcccctgccctagagatctgtggagctttgaatttgagaaagatgatttagggtatctggcagaagaaatttcctaggggctaaacattcaagaagaagcagagaacaaaagcttggaaagtttgcagcctggtaatgtgataggaaaaaaaatatatatatatatattttctggggataaattcaagcctgttgcagaaatttacataagtaacaaggagctgaatgttaatcaccaatacaatgtggaaaatgtctccaggtcatgtcagagaccttcatggtagcccccaccatcacaggcttggaggcctaagagagaaaaagaattgttttatgggccatcagggccctcttgctgtgtgcagcctagggtcttggtaccctgtatcccagctgcttcagccacggctaaaaggagccaaggtacagctcaggccatgatttcaaagcatgcaagccccaagtctttgtcagcttctatgtgtgttgaccctgtggatgcccagaagtcaagaactgaggtttgggaacctttgcctagatttcagaggatgtatggaaacacctggatgtccaggcagaagtttgctgcagggatggggccctcatggagaacctctgctagggcagtatggaagggaattgtggggtcagagttctcacacagagtcctcaccagggcactgcctaatggagatgtgagaagagggccaccatcttccagaccccagaatggtagatataccttcagctttcactgtatgcctggaaaagagacagacacttaatgccagcctgtgatagagacagggaagggggatgtaccctgcaaaggcagtggggcaaagctgcccaaggtcatgggcacccacctctggcattagcatgacctggatgtgagacatggagtcaaaggagataattttggaaatttaaggtttaatgtctgccctattagatttcagacttgcatagagcctgtatgtattagtcagggttctccagaggaacagaactaataggagatatatatatatatatatatatatcactaagccagtccaagtctcaaagctaaagaacttggagtctgatgttcaaaggaaggaagcatccagaacaggagaaagatgtaggttggaggctaagcccatctagacttttcatgtttttctgcctgtttcatatcctgaccacacgggcagctgactagatggtgcccacccagattaagggtgggtctgcctttcccagcccactgactcaaatgttaatctcctttggcaacaccctcacaaacatacccaggatcaatactttgcatccttcaatccaatcaagttgacactcagtattaaccatcacaagtccacctttgtcaacttgaacccatccacatcacctgagatcaaacataatcttcaaataaagacaataataagatcataattacacctaacataatacaactatcattggtacaaccagaactacatcaattcccaacccaaatgctattacataaagttaacaatacttaaatgctagcatgaagtcaataaatcctatgtaacctgataaaggaaaaaaggaataaaatggagatattttcttagtacaagtgcacacatgcacaaatagtttttaacaaaaggaggaaatacttataacaattacagtccttgtttctgcaactggtcacgtggtcatagccggtattgatgactaccttctactacccattctgtattccctttgccttcagcaagcacctcagcaggttgtgggttttttcctggtggagtgacataaaactccattcctgaagggtctgggccatttgtagtcctgcctgggttgggcttttacagtttctcattgaccttaatcacagagcatggtaatactaagagatgccctaatggatctcctgtattccatgcatactcttctttacctctgttgtaaagtagtaggtagatttcatcttgatagtccagttcagtcaccccagccaacactgtaactcccttcttaccctcttggctgaaaggtaggaggagcccaaagtgtccaagtggcattcttaacttacaatttaatgaaatcattgttgtgtctcctggtagcagcattcctccctctgaaattaagagatctaggccagcagaatgtaatgtcatggtaacaggaagcaaaaaatttgctagtggaccactaggggtgatggcaagtgatgccacttccacatccaccccttgattcctggacccatgaattctggctatgagagaaatagtaccatatgttggatgctgattcagagcatacacagccttctggagaactttgcctcagccctgcaaagtatggtcatctagttggcattgtaattgtgacttcaaaaggccgttccaccattctgtcaatccagctgcttcaggataatgggcaacatggtaagaccagtgaatttcatgagcatttgcccactgtcgcaagtgagtgccttggtcagaggcaatgctgtgtggaataccacaacggtggataaggcattctgtgagtccatggatggtagttttggcagaagcactgggtgcgggataagcaaacctatatctggaataagtgtctattccagtgaggacaaacctctgctctttccatgagggaagagatccaatataatcaacctgccaccaggtagcttgttgatcaccccgagaaatattgccatattgagggctcagtgttgatctctgctgctggtaaactgggcactcagcagtggccatagccaggtcagcttggggcagtggaagtccgtgttgctgagctcatgcataacctcctttgctgccaccatggccactttgttcatgggcccatggggcaatgacaggtgtggctgtggaaagagactgagtagtgtccacagaaaaggtcatcctatccaattgatcattaaaattctcttctgctgagatcacacgttggtgagcactcactttggatacaaatatcttcacagtttttggccactctgagaggtatatacacatacctcttccccaaattcccttgtcatcaattttccaattatgcttcttccaagtgcctgaccatccagccaaaccattagctacagcctatgaatcagtatacaatggcactactggctatttctctttccatgcaaagtgcacaaccaggtatactcttcaaagttctgcccactgggaagatttgccttcaccactgtccttcagggataggggctatagagctgcagctgtccactttcaggtggtgcctgcatatcgtgcataaccatctgtgaaccaagccctagtcttctcttcctctgtcaactgatcatagggaactccccatgaggccatcagtgcaggctaagggaaagaaggcaaggtggcaggagtggagaccatgggcatttgagctactttctcaggtaatttacttgtgtcttcaggacctgcttaagccagatcacatatacaccactttaatttgatgactggatgctgaatgctgctgtgcatggtccccttgatgggatgatggctcagaaagcacccagttcataataagcaattcaggtcacatggttgacttgatgagccatagtcaaaagttcagtttccaccaaagcccagtaacaggccaagagctgtctctcaaaaggagagtagttatctgcagaagatggcagggccttgctagaaaatcctagaggcccctgctgtgattgacctatgggggcctgccaaaggctccaaacagcattcctatctgccactggcacctcaagcacctttgtatctgctgggccatatggcccaagtggcagagcagcttgcatagcagcctggacctgttgcagagccttcttgtgttctggttcccactcaaaactggaaaccttttgggtcagtcagtaaatgggcaagaataacacaaccaaatgaggaatgtgttgcctccaaaatccaaataggcacaaaaccactaagcgttgtgcctttttcttgcttgtagaaagggccaagtgcagcaacttatcctttaccatagaaggaatgtctcaatatgtccaacaccactagacaactagacccctagaaattttactgaggtagaaggtccctgaattttagtcagatttatttcccatcctctggtatgcaaatgtcttaccaataagtccaggatgtttgctacttcttgctcactgggtccaatcagcataatgtcattaatgtaacaaaccagtgtgatatgtttgtggaagtgaaaagtgatcaaagtctctttgaataagattatgatccaaagtcagagagttcatatacccctgaggtagaacagtaaaggtatatttcctgtaaaggtatatttacattgccagctgaaggcaaattgcttccaatggacaagaatggagaaaaaggcatttgccaagttaatggctgcatgcaagataccagcagacgtgttaatttgctcaagtaataaaaccacatctggtagagctgctgcaattggagtcaccatttggttaagcttacaataatccactgtcattctcctagatccatctgtcttccccacaggccaaataggacagttgaacagggatgtagtgggaatcaccactcctgcatctttcaagtccttaagggtgtcactaatctctgtaatctttccacggatgcaatattgtttttgatttatgatttttctaggtagaggcaggtctaatggcttccatttggcccttctcaccataatagccctcaccctgccagtcagaaagccaatgcgggggttctgccagctgtgaagtatgtctatgccaattatgcattctggcactgaagaaatgaccacaggatgactctgggaaactcctggagttgtgtaagtagggcctgagctaaaactgtatcaattactgcctccataagtccctactttaactggaggaccacagtgacattttgggccccctggaatcaacgtcagcttagagtcaatgtctagtagtccctgaaacgtctaatcatttccctttcatcaatgcacagttaccctggtaacaggtcagaagtctccttggggaagaatgggagaaagaataacagcataaattgtcagtagtatagtggggttcttgatcaaagggacctggcctcccctttattcaaggggttctggttctggcttcaatctggaaattcattgaggggccatggttctctgtttttatcattcaagttagtcttttgtccatttgacctgggcgttttctgcctatataaattaagcaggaattcagttggcttcctatcaatttcatttctaggaacatcatgattagccaataccagagttctacacgagtttgcactatttaattgctgcgttgcctctgctgtccattataatagctatgcccaccttgcctgcgatggtttagtgctgccacttggcccctgccacctcaggatccaattattcccattgtatttcaattttgtagttgggtgactgcagctcccactgttagatctgttatacagagaagagcaattacagcactcttcaaagatgcaggtgctgcctcacaagtctatttcacaaaacattggtcaagggtatatcttctggacccacccagctcggataagtaggtgtaaagtgactaatctcctccatcatcccaatctttctaagccttttgattctttcctctacattaacccaagggaggaaattaggcatttccagctcgctcacagtaggctatcttttaatccatatttcagccaaccaagcaaataaactatcagaacctttttttaactccccaagctgtaacattaaatgcagagtccctacctagtgggcttaaatcgatacattcagcctgatccaactgtatgttccttccactattatcccatacccttaatatccattcccattcctgttcaccatatttttgcttatataaatagaaagctcaagcagttcttttgagtgtagtgcacctcctcataggtcacactctcaatctccccttaggggtccactgggactttagtctagttataggcctagaagcaaacaggggtgttgggggtggctcctgaggagaatcaacattatcttgcctgacgactgcctcaggggaggtcatcactgttgcctcaggcagcgcagggtttatctcctcagacaaaggtggaaaggctgatggcagcatggactggggaggggatgttgccactattggacatggagaagctgtttcttctggcaaaaagggttcatcagagttgacaagctcagtgtgcccaccttcatcagagtcctcccacacattccccttccaagttgcagggtcttattcttttccaattaatgccctcactttaacagtagacacctggtgaggctgcgcatgcactttcatcacagttctgccactcgcatgataagagcttgtatctgtttttccacaatttcagctctgtctctacaggagataagactcccactcagggtaatcttagcagatttgatacttagtatctgcttctgaacctgggagttagaatccctgagttcatcattttctttcatccttttgtcaagtgaacttaggagcacccaaccgacttcattttgttccttcattctccatatatagtcaaaggtattacgtatagagtcactaaactccttgactgtcatgagcagtgaatcaggagtgtcaaatgggtttatttttcataactatctaaacagttcatgccaaggactatcagtgttctccatactattagagtagagtccttagcattttggggtctaatcatattaaacagccattctagaaatgctaaaaacaacagaagaactccattattaatattctgttcctctagaaccactcctgataccaaactctgtgttagtcaaggttctctagagagacagaactaataggatctatatatagaaagggagggagtttattatgttgcagtaactcacatgatcacaaggtcccacaataggccatctacaagctgaggagaaaggaagccagtccaagtcccaaagctgaagaacttggagttcgatgttccagggcaggaagcatccagcacaggggaaagatgtacgctaggaggctaagccagtctaggctttttacgtttttctgcctgcttcatatcctggccacactggcagttgatcagactgtgtccacccagattaagggtgggcttgcctttcccagcccactgactcaaatgttaatctcctttggcaagacccttacagacccacccaagatcaatactttgcatccttcaatccaatcaagttgacacttaatattaaccgttacactgtagcttctttgttttggccagtatcttccacttagaatgtgtatatttacccaatgactatactccattgtatctgggaggtaactaacttgcttttgattttacaggttcataggcagaagggactgccttttctcagatgagactttgtacttggacttttgagttaatgctggaatgagttaaaactttgtgggactgttggaagggaataattgtgttttgaaatgtgaggacattagaattgagagggccatgggtgaaattatatggtttggctctgtgtctctaaccaaatctctctcaccttgaattgtaataatcccatgtgtcaagggcagaaccaagtagaggtaattgtagcatggaggcagttccctcatgttgttctcatgataatgagtgagtctcatgggatctgatggtcttataataatttgacatttcccctgcttgcactcattctgtttcccgcaaccctgtgaagaggtgccttttgccatgtttgtaaatttcctgaggactttccagccatgtggaactgtgagtcaattaaacctcttttctttataaattacctagcctcaggtatttctctacagcagcctaagaacaaactaattatctatctatctatctatctatctatctatctatctatgatctggctagagctatatatatatattatatatataatatatattatatatataatatatatatataatatatattatatatatatataatatatattatatatataatatacataatatatattatatataatatatattatgatttatatatatatatgatttattatgaggtataggcttatggaattataaagtctgagaaatcccatctgtgcaagatggagacactggacagtcagtggtgtagttcaaaagcctgaaagccagagagccaatggtatagatttctgtctgagtttgaaagcttgagaaacagaaggaccaagggcaagaaaagattgatgtctcagttcaagtaggcagaaagagaatgaatcctctctctttcatctttttttttctttattcaattatcaagggactaaatgttacccacccacaatggggaagccaactcagtttattcagtctactgattaaaatgccaatctcttctataaacactctcatggacacacacagaaataacgtttaatcagctatctgggcatcctgtgatccagtcaagttaacaaaattaactttcacaaatacactaattgtcaatgtggcattatattcatctccttacatatttaaatactatgatataaagccaatatatcttatgttacatgataagagaataggagaaagaagaaaacaatggtattatatacacaatatatacacaatcaaaaatgcatttataacaaaatggggagatcatatttatgacaatcaaaattatcattgctgtaactggtcatgtagtcatagctagtatttataactactttattcaactaaccattctgtattccctttgtcttcaggaagcacctcagctggtagtggttttttgtcttttgtggttacccaattttttattcctgaagggctgtgatcactaacaaccttgtcctcattgggctgttgtttcctattaaccttaatcacagggcatggtaatattaaggaaaactataagggatcacccacactctagatgtattttaccttacctacattatgaactagcagtccaatttccccttggtagtcaggatcaccccagatagtactttaactcccttatttgcctattgattgagaagcatgaggagttcaaagtgcccaggtgagtcttagcttccatttaaatggaatcattattgtgtctcctaatggaaggactcctccctttgcaactaagacctccagcccagcacagcacagggtttgggaaaagaaaataaatattttgctagtgagttgttagtggtagtagtgagggttttcactcccatttctactccttaattcctagacccatgaatgctggctgtaggagaaacaggatcatatatcatatgttgatacagaacatacacagccttctggaaaccctttccccattctatctcaacaaatgttcttgctttaacaagaacatgctgaaagacttggagtttaatttccgttacaattcagccattcacaggatgagattctgcatttcactttctgcaatctcaactctgtggacaccaaaaataagagttatcttcagatgacaataagtcctcaggtcacttatgcttgtgggactttaaatcctaagctcatccttttctttcaccactttgtccagtgacattaggagcaaacggccaaccttgttatatttgttagttttccaaaactgttcaaaagcatcatctacacagtaattcagttccttgctttttataagtggtatccaaggcagatgttttgtatatctctattaccagattatgtcatggatgttagtgctctttactactggaaatagagtcatccaaacctttacatataatcagattagacaatttattccaaaatctacagcatcaatttgggaaagttatttataaaattctgtttctgtaaaaccactcccagtaccaatatatgtcttagtcagggttatccagagaaataaaatcaataaaatctgtcctctgaaacctggagacccagctggtgtagtctgaaggcctgaaagtcaaagattcaatggtgtaattttagtcccagtttgtaggcctggcatttcaaagaaaggagaggaatagatattccagctcaatcaatcaggcagagaaagagtgaattctcctgtgcttcaccgttttcttctattcagacgctcactgaattagttgatatcacacatagagaagggcaatcaagtttactatgtctattgataaaaatgctaatttctcccataaataccatgacagagacactgagaaatgttgtctaaacagatgtctggatcccatgatccaggaaagttaacacataaaacaaaatatgacaatcaataactaataacttttcaaataagaaaccacaatatttgaatggttgcactgctgaaatacaccaattgtttaagaagaaattgtacaaattttccacaacctctgtcaggaagtagaaaaaaacaagaatatttcctaacattttttataagacagtgttactctaatactaaatatagataaaacccttacagaaaagaaaactaaagattatgaacacaggtgaaaattttacatgaatacagattcaaaatttttcaataaaatattgacaaatcaaacaacaacatataaaaataattctacaccatgatgaagaaggaattattccagggacgcaaggctgttctacatccagaagtcagtgttatctaccacattaaagacaaatgaagaaaattgaataattatatcaatagatacagaaaaagcatttgaaaatacatgacacctattcataataaaaagtattaacaaattagaagtagagaggataggaactccctgtatttgatgaagacacctacaaaaatcctacaggtggaatcatatttaatgttgagagattggaagcttttctcctaagactgggaacaaggcaaagataacttctctcatcatttctactcaacatcatactaaaagtcttaactagtgcaataagacaagaaaagaaataaaaaagatagaaaaggaagaattagaactatctgtgctgagtttatattattatctatataacaaatctcaaggaatttgcaaaaacaagaagtttttaaaatctaatttaagtataagatctcagaaaacaaggtcaatatacaaaagttagttacttactatgaaattcatcctttgcagtgagcaatgagaaacaatattagtttctaaaaatgccatttacaattgcacagacatgaaaataaatactgatataaatcagacaaaaaattttaataatctccatgtcttttactacatgtgaaaaactacacattctgatgaaagaaattacagaagatctaaataaagtgtgataagttcaacattacttcactaaatattgttaagatgttaattctctcctatttgatgaatatatttttagaaaaatactttttttagatatcaacaaacagatatataaagtttatatgaaaagtcaaaaaacctgaaatactcaatgcaaactgaaaaaccataaagttggaggatgcatactacccgattttaatacttactataaaggcacagtgtcaagacagtgtggtattgactaaagaattcacacatagttcaatggaactagtgggtccagaaataggcctcatacaaatgtaatcaactgatctttgataaagaagcaaaatgcaattcaatagcaaaggaatagtctttgcaataaatgcagtaagtggtgctgcaacaatgggatatccttctgcacacacataaaaaaatgaacctggacacatgaatctcagagcgtcataaaatatcaacttaaaataggacatagatttaaatgcaaaactacaaatataggagcaaatttaggtgaccttgaatttggccataagatttcagatacaaccacaaaaagattctgtgaaagcttagatgttactaaaattaaaaacttcagccctgtgaaagtcactgttaggataatttttaaaaagtaatagactggggaaaaatttgcaagacatgcatctgataaaaggcttgtatccaaaatatacaataaacacttaagactcaacaataagaaaacaatcacatttgaaagttggcaaaagatttaaatatacacctcatcaaagaagatacacagatagaaaataaagatggtcaacatcatttgttactagaacattgcaaattaaaacaattaggaaccactacttatttattagaattgctaaaatctaaaaatctgataatacttaatactgagaagaatgcagagtaacaggaactttcattcttttctggtggaaatgaaaaactgtacagattacttggaaggcaacttttcaatttctttctttctttctttctttttttctgggacagagtctcactctgtcacccagtctggagtgcagtggcacaatcttggctcactgcaagctctgcctcccaggttcttgccattctcctgcctcagcctcccaagcttttcaatttcttatcaagctaaacatataattcagcaatcatgctcctagatttttactaaactgatttgttaatttttgcccacaaaaattctatttatatttttatagatgctttattcataattaccccaaactggtagcaatcaagacgttccccaagaggtgaacagatagtctgtgatacatccatacggtgagataatattcaatgataaaaagatatgagcaatcaaaccatgaaaaaaatgaaagaatcttaaatgcaaatttctaagtgaaataagccaatctgaaaaggatacagactaatgattctgattatgtgatattccacaagaaagaaacctatcaggggttgccagatgtttgtggggagtaaaggaggatggaagaataattgatgcacaaatgattcttctgtcaataaaactatgctgtatgatactgtaatagtggatacatggcattatatatttgtcaaaaccaacagaactttacagaagaaatagtaaaccttaatgtatgcaaatttaaaaagaaacatatagtatgtctggagatccctgacaccaactaagcaaaaaaaatctaactgtatttcacatgtgtgacacaacctcactgaagtcagtagaggaagaaaatgtgctaacctaagttactttatatatgatataaatgaattttatttgtctcatgaacactgtactttagttgacaaaaatgtttttgttaagaggtaacttaggttacaagtgctctgctgaatgaattgattaatgccattatcttgagagtaggttagctacctaggaagtgagttcttgataaaaggattagttcagcactattcctatttctctgtcacgtgcatacatgctgtcttgctcttctgccttccaccatgggataacacaggaggaaggtccttgttacatgtaggttcctcaaccttggatttcccagtctcaagaactgtaagaaataagtctctgttctttataaatcacccagtctaaggtatgctacattagcacaaaatggactaagacgctatctatccatctacctatatgtctatatatctatctaatctatctggctatctatctatctatccatctatcatctatctgttcccacctaagcaggtgaaagtaagctacctcataaagcagaagataatatacacatcaaaacactctcttacctaataaagactggtacattaaaggtagtggtatactgcttttacatctcaatgtttatttgctcatttgtttttcccaactgtgaacaaaatgttatgcaaaagctattataatagcaactagtatgcagctccaccatctttaacttaattggagagagacataaagaaaaacctttgttcttaacattcttgcaagaagaaacaatatgcagagaatgtttttttctctctctctctttctctgtgtttatgtatacgttcattaatctatacttatatacattaaaattcagttttttaaaatgagtaggaaaatgggtgtttcagtcaactaaatattctaattaattcaatattttatcctgtgagatgttcaaaagatcaaatatttttaaaagtcataataatcccataaaattactgagatagtccctctttcttcctcatgttttgtctaggtcactcctaccagactgaacatgaatttgataatttttttatcttattcatgcacaagcttagatttgattccttattttatatttataaactatttttgtcttgcctctgacttttttgtatcagattgaattttattctactgttttatttaagccctttcttgcaattaccatcatcctgaaccaatatagaaatttcagtgtgtttacttcttccttgagctcacaatgagatctcctgttataggctaatggctacaggcatattttagtgtcataattttcacagaacccatatataaataatccaaactaaccctaaaattataccaaaaaattaatgtgattaggatgataattcacagtcacatagtgttttggaatctttgtggtgaaaataaattgtttgtttaaaactattgacttagaagttggactctattattgtgtaatgactgaaacaagaagtaacatttttcaatatatctttatataaggaatattctctgatatggtttggctgtgtccccatccaattctcatcttaaattgtaactcccacaattcccacatgtcctgggaggaaccgggtgggaggtgattgaattatgggggtggatctttcctacgctgttctcaagacagtgaatgagtctcatgatatttgatagttttaaaaatgtaagtttctctgcacaagctctctttttgcctgctgccatccacgtaagatgtgacttgcacctccttgtcttctgccatgattgtgaggcttccccagccatgtggaactgtgagttctccattatacctctttcctttgtatattgcccagtcttcagtatgtctttatcaacagcatgagactacactaacacattctcattttgtgtgtttcagagaaaaaataataaggcaagaaattccatttttgaaaattattattgcttgaactttagacaaatgggaattgactgtgtttgtttaccctaacatggactgggtgctggcaaattacaactgcagttttgtttctgcagcctcaaatttaatcttttattttgtcagatgtggctaagtgaacaatttcccaccccccccccaaaaaaaagactaaaatagtgagcctttaaaaatcctatttctcttctagacttggatccctaagtaccagtcaaggaaaatatctaatttcttcaaggaaaaagagttcatatttcttttgaaacatatcatgttgccatagttaccaaatgctctcattttatttcctaacaataatatcaccatctagatacacatagcttacaaaagtaaatgttttattgtggaattttataaggacacaggatctgcttccaatgacttttaaaaaattaaaatggaaggattcttgctaataaatacacctgagttgaaattaaatgttttctgagcaagagcataggagaaaaggaggagcagagagaaattgaaaaagacacatacagttttaacatttcaaaggtgaaggtgatttaaattaggatttgggcatggttgttcttctccaccccagtgtatataaacattctcatatgggttgccatgtctccaggagtgataccatcatctggacaggccattagaaattaaaacatacttacacatatacacatgcacatcttagaataagaaaaattataaaccagcttatttctatttgtcttgccaaatataaactttagagccaaaattttaaacaaagcagcaactatgaaaataaataatgagatccctgtgtacagaattacgtagttggggtttacatattgggaaatcaagctccaagtagaaaggaatcagttttctccgtctttcctttctcttactttttaagaagctatcacaagaattttatttacaggaatttaaggtggaaacatataccttttggggagtaaatcgttactaaaaacataattaatgtggtcattttgaacaatattatcaaatagttacctcaatgaatcataaaaatcatcaaatatgtacatgatttgaaaaatcttgaaaactaagaaagttgaaatatgtaaaaagtaaattaatttcatagtctacctttatagataaaacatcaatagctaatattaaactataagcattattattaaaatataaacattaattgaaaatttaaaattaaatttaaaaattaattaatttctttatatcttcctatttcatacttaaaaggtttcttattctagcctaaatggtgtatcacaaactgcaaattacaatatttgatgttttaatgcactatgtcggggggtggggggcaaggggagagaggaagagcattaggacaaatacctaatgcatgagaggcttaaaacctacatgacagtttgttaggttcagcaaaccaccacggcacatgtatacctatgtaacaaacctgcatgttctgcacgcatatcccagaacttaaagtaaaacttaaaataagaaaataataataataaagaatgtgttatttaaatgtaatctttagcatttcagttttgtttactggagtcataatctcaatattatttttaaatatagagaattcaaaattatttaacataaagtatacttcattttatttgtaaagttttacccatcatttttaaaatgaatgatttaggcagagcattatggcatttgagaagaactggccttcattgtaagttgactgtaggatttattgatacaagcaaaaatgcataaaaaagaaaaatttttcataattttgtttttcaaaaacttatatatgcgtatgtgtatgtgtgtatgtatatgtgtatatttaaatatgtatcatgtactttagagagatttttacatccagtatggctcttaagataaaggccatgattcccattttataagttttctcttgattagaaaactagttttgtgtggtggtgggtgagatgttatattgtttacttcctcaaactctgttagccttccttaaacttattttggtttattattgtttgtatttttaattgtatgcttggagggatcctttatctttccaatcagccttgtccaggtctgaatcccatctcctttcacctccttgagaatttttattctcaagaggtcaattttttttctgtcttcttactctcatttcccactagtggaggcttatctaattataaacaataaagaaatgattttgaaattatctttttacttatacacccaaactggtatctgtagattctttcttatcttttgcttacccatttctgaaatgttcctatgcctaaagccagatgctctttttttttttttaatctgctgcagtctttttggacaacttagtcctcttccagttgcttcacctctcactcataacttgctgactccagaatctataactctttaattcttttctgaggtcctgagatacatatatacatatatataaaatataaaatatatatatatacacaatgttttattgaaacttcccaattattgcatgtcaggtattctcatttcacagaccaggaaacagatacttacagaagttaagtattacagcaggtttactcaattagcacatgtccaagctagtatttaatccaaaacttttgattttttttctattatatacgctttctttccattttcttgaattccagttttgtctaccagggtaaagtacatgattgctaaagaagggaggctttagaatttctctctctctatcttttttattttttatttttttggaacccactgcatgaatttttcagattccagaaataatgctttgcaatgaatgaggtagtacttttaattctatatatttttgccataatgtctatgcacccagcctgtgaaataaattgcactgacctgtgtctttagtgcctgtcacttaaaatttttccaaaccaccttaaatgttgaagttaataaaattggtaatgctcgacgtgggggaaaaaaaaaacaacgaaaaccactaagatgttctactttatggtctctgcatgacatctagtggttggaactggaaaatttgaggaaattatgattagtatcagggaaaatacaatctgtgttagtctggagtcctcattcctaacatcaaaggaaacatgatgtagatatcctctacttccaaagaggttggccactggcaggtaggccagtggcctttctgttcatttcttaatgaattgaacagaattcattaagaattcttaatcttcacacagaagattaatctttcttaatcatttctgtttctcagtctgtgtatcagggaataacagtttctctctgtgttaagcaatctgtgctcactggggcttgtgaaacattggtctgtaatcagtacctacttttgatagatatgagttggataattataagatgcaaaagtaaataaaccctttggttttctttctttatacgcaagtattaatgatagtaaatctatgaccctattattcaaaattgtatttagaaaagctttttatatactccagttttgattattctaaagaggttataaaatcgagtaactgcttagctttgagtcttagggatgatattgggtgtaggtccttgataatccaagatttaggatctgcctaccagaaattttagtcagcttagataactgacaatggaaaacggtacatgatatgttctaaataaatgacacagccaatgttgtagggatgccgcagaggatttggagtccaagaggtcagagaagggatcatgaaggaggatggatttgaactgagctgcagttgatagatgggcagcttaaggtattgttaagcaaacaggcaacagagtgagattcctgggtgttggctttccttcagtgtgaccttggacaaactatctagttgctccacattttactttcttcgtttgcatcacagtatgtacacacatagatacatagcatctatttcttgtggtgaagatcagcataatgtctcagttggcaaattatcagttctttttattataaataaattaaaaatgcaaatgtttaggtcaagtgttattctctgaaaatgcacaaagagaaatgagccaagagaaaaataataataaataaatattatatttctgacaccaagacaagtccaagagaatttaaaaaataattataaatattttatggtaatgtatttcaaatatacatgcttcagattccaggatttatgtcatggggatggatcaggagtccttgaaacctggcacttattaataaatgttgtttctaattttctatcactgcaaggtactcttatagacaccatgtgaacatagtacttttatctctctagccttgcacatagtacttttatctctcgattagcatgtttccatcttttctacctatgtcaactctattcatccatcaagatctaattcaagctctatctattcctcacatccttccttggccacttctttcttctgaattcctatttattttcctggttttttttttttttttttttttttttttgcaattggcatatactgctaggtatcactcattttttctgtggaaagaaaaaatactaactgaatttttgtatatatttattaatatccagataggatatcataattaaagtaatcagatcaagtttctaaaatattactggctcttgttttccattcccaaacacctgagagatactgtccacttaacaagtgaaacagtggtctgtatatccagcatttgtagcctacaatctccaaagtgtgtttttattatgaccttactcctccttactgtccatatttcacaaaaagaagttatccattggggaagaagatcttaatccattaccaaagacatttttaatagtaattaataacaaatcccatatgttctatatatttgggacataaataaataatgtaaaatgtcggtacaaatagtttctctacactcaatgatattatattattaaagtcagctgcatttaaaaattagtagaatttgtattttagaacacttttagatttaaaaaaataattgagcagataggctgggcatggtggctcacccctgtaatcccagcactttgggaggccgaggtggacagatcacaaggtcaggagatcaagaccatcctggttaacacggtgaaacctcgtctctactaaaaatacaaaaaagtagccgggcgtggtggcgggtgcctgtagtcccagctattcgggaggctgaggcagggaaatggcgcaaacctgggaggcggagcttgcagtgagccgagatcacaccactgcactccaacctcggcgacagagtgagagtgcctcaaaaaaaaaaaaaaaaaaaagagcagataatagagtcccataaacaatctccatttccccccacattcctccattataaatatctagcattaatgtggcacatttatcacaatagatgagccaatatttatttataccatcagtttatactaaggtccacagtttgctttgtatagttctatgagttctgacaaatgtatatcgtgtatccactattacagtattaagcagaatagtttcactgatttaaaaatcccctgtgattcagcttttcatcctttttctcctctcctcaaggcccttgcaaccactgatcttactatctctaaagttttgcctttgccagaatgtcatatggctggaatcatacagtatgtggctttttcaggctggtttctttcacttagcaatatgtacttaaggttccccttgtctttttgtggcttcacagctcaataccttttcattgctaaataatattccaatgtatacgtgtaccatagtttgtttatccatttacctattggatatattggttgcatctggtttttgatgatacgaataaagcttctataaatagtcatgttcaggtttttgtgtggacataagttttcaattcaattgggcaaatacctgggggcatgactgctggattatatagcatattcagtttttaagaagctgccaaattgtcttcccatgtgactgcaccattttgcattcccactagtaatgaaagaattttggttgctttgcatccttgccagcatacagcactgtcagttttttggagtttagtcatgctaatagttgtatagaggtatctcattgttgttttaatttgcgattcctttttaaataatttcaacttttattttagattcagggggtacatgtgcaggtctttacctgggtatattgtgtgatactgaggtttgaggtatgattgctcccatcacccaggtactgagcatagtacctaatggtttttcaacccttccctcatctactccccgccagtagtccccagtgtcagttgttgccatctttatgtccctaagtacccagtgtttagctcccacttataagtgaaaacatgcagtagtcagttttctgttcctgtgttaatttgcttaggataatggcctccggctgcatccatgttgcaattccttgatgatctatgatattgagcatcttttcatctgcttatttgccctttgtgtatctttagtgaggtgtccagattttgcccactttttaactaggttttttttcttattgttgtgttttcagtgttttttgtatatgttggatatattgatatattttttgcatatatgtatatgtcggtgtattttagtgacgtaaaatgaatggaatctatagccttaaacataatataaatatataatggttaagatttcccactcaacaatccaggcttgacagaaaatcataaaatgtatttaaatttaaatgtttttttctttgttgatactagttcttagttttaacatgccgaagagggtatacttgatcaaggacaagattaaatgttctgattggctaactatcaaaccgctgcctccacttttttttgcaacttgaaaataatatttagttatcatgctagcacagccatattaatatataccccttcaaaactttaaatataaagctttaacagtttcacgaaaaagaaatattaatgatgctgagattggtgggcatggattctgtgtagtgagacactgaaaagtaatttttaaaacaggaaagttaaagcactttaaaatcacaaacctattggtaattaaaaaagaattagtatcaatttctgaaatacaagattagagggacacctaaaattctgaaagattttagagaatttttttaaaaagtaattgcaatttagatcaaagttccccacttttcattccaagtgtgatacaggtttaaataataaacagaaaaaaaagtttagataaattcacgaattattgaaccagatgataaacaatagggaagctatttagggcatagtctctagtgtgtaagggtgacatcctaagtaataaatttatgctattgttgacaatattgctggcaaggctaaatggtcaatgtgcttgacatattgcctggtttttcatgttctattgcaagagctgattctctctctctcttttatttatatttttgaactctaccattatgctatcatggacattatgttaacaatttgatgcatctatgtaatatgctttaaatctttgggaataaatttactgagtgctacttatgtgaacaaacttctcttaagcacaaatggaaatccacaaagaaagacagcctcttctatttgttttatgtgaggcaacggatacactgtagacaaaaagaccaagtataattaacttatattgttaactaacttaatatctgcatattacatatttttctattatgctttctgagcaacttcgtggcttctgttttggagggtagg
